(19) United States
(12) Patent Application Publication
(10) Pub. No.: US 2024/0200104 A1
(43) Pub. Date: Jun. 20, 2024

(54) LTR TRANSPOSON COMPOSITIONS AND METHODS

(71) Applicant: Flagship Pioneering Innovations VI, LLC, Cambridge, MA (US)

(72) Inventors: Robert James Citorik, Somerville, MA (US); William Edward Salomon, West Roxbury, MA (US); Zi Jun Wang, Arlington, MA (US); Jacob Rosenblum Rubens, Cambridge, MA (US); Benjamin Harris Weinberg, Cambridge, MA (US)

(21) Appl. No.: 18/282,644

(22) PCT Filed: Mar. 18, 2022
(86) PCT No.: PCT/US2022/020899

§ 371 Date: Sep. 18, 2023

Related U.S. Application Data
(60) Provisional application No. 63/163,532, filed on Mar. 19, 2021.

(51) Int. Cl. C12N 15/90; C12N 9/12; C12N 15/86

(52) U.S. Cl. CPC C12N 15/907; C12N 9/1276; C12N 15/86; C12Y 207/07049; C12N 2740/10022; C12N 2740/10023; C12N 2740/10043; C12N 2800/90

(57) ABSTRACT

Methods and compositions for altering a genome at one or more locations in a host cell, tissue, or subject are disclosed.

### CROSS-REFERENCE TO RELATED APPLICATIONS

[0001] This application claims the benefit of U.S. Provisional Application No. 63/163,532, filed Mar. 19, 2021. The contents of the aforementioned application are hereby incorporated by reference in their entirety.

### SEQUENCE LISTING

[0002] The instant application contains a Sequence Listing which has been submitted electronically in ASCII format and is hereby incorporated by reference in its entirety. Said ASCII copy, created on Mar. 17, 2022, is named V2065-7016WO_SL.txt and is 662,130 bytes in size.

### BACKGROUND

[0003] Integration of a nucleic acid of interest into a genome occurs at low frequency and with little site specificity, in the absence of a specialized protein to promote the insertion event. Some existing approaches, like CRISPR/Cas9, are more suited for small edits and are less effective at integrating longer sequences. Other existing approaches, like Cre/loxP, require a first step of inserting a loxP site into the genome and then a second step of inserting a sequence of interest into the loxP site. There is a need in the art for improved proteins for inserting sequences of interest into a genome.

### SUMMARY OF THE INVENTION

[0004] This disclosure relates to novel compositions, systems and methods for altering a genome at one or more locations in a host cell, tissue or subject, in vivo or in vitro. In particular, the invention features compositions, systems and methods for the introduction of exogenous genetic elements into a host genome. The systems described herein typically include a template RNA comprising a pair of long terminal repeats (LTRs) flanking a heterologous object sequence (e.g., encoding a therapeutic effector), which can be introduced into a target cell with a structural polypeptide domain and a reverse transcriptase polypeptide domain, or nucleic acid molecules encoding same. Inside the cell, the template RNA and reverse transcriptase polypeptide domain can be enclosed within a proteinaceous exterior (e.g., a capsid), e.g., to form a virus-like particle (VLP). The reverse transcriptase polypeptide domain can then generate a template DNA from the template RNA. The resultant template DNA can then be integrated into the genome of the cell, e.g., by an integrase from a retrovirus or a retrotransposon, e.g., an LTR retrotransposon. Additionally described here are integration-deficient systems for providing an extrachromosomal DNA molecule to a host cell that does not undergo genomic integration. Thus, this disclosure provides systems capable of producing therapeutic DNA in a host cell, e.g., DNA encoding a therapeutic protein, by reverse transcription of an RNA template comprising LTRs, wherein the therapeutic DNA is optionally integrated into the host genome.

[0005] Features of the compositions or methods can include one or more of the following enumerated embodiments.
[0006] 1. A system for modifying DNA comprising:
   [0007] a) a template RNA comprising a first long terminal repeat (LTR), a second LTR, a heterologous object sequence encoding a therapeutic effector, positioned between the first LTR and the second LTR, and optionally a primer binding site (PBS); or a DNA molecule encoding the template RNA;
   [0008] b) an LTR retrotransposon structural polypeptide domain (e.g., gag, e.g., a viral capsid (CA) protein), or a nucleic acid molecule encoding the structural polypeptide domain; and
   [0009] c) an LTR retrotransposon reverse transcriptase polypeptide domain (e.g., pol) capable of reverse transcribing the template RNA, thereby producing a template DNA, or a nucleic acid molecule encoding the reverse transcriptase polypeptide domain.
[0010] 2. A system for modifying DNA comprising:
   [0011] a) a template RNA comprising a first LTR, a second LTR, and a heterologous object sequence encoding a therapeutic effector, positioned between the first LTR and the second LTR and optionally a primer binding site (PBS); or a DNA molecule encoding the template RNA;
   [0012] b) a retroviral structural polypeptide domain (e.g., gag), or a nucleic acid molecule encoding the structural polypeptide domain;
   [0013] c) a retroviral reverse transcriptase polypeptide domain (e.g., pol) capable of reverse transcribing the template RNA, thereby producing a template DNA, or a nucleic acid molecule encoding the reverse transcriptase polypeptide domain; and
   [0014] the system comprises neither an envelope polypeptide domain (e.g., a retroviral envelope polypeptide domain, e.g., a lentiviral envelope polypeptide domain) nor a nucleic acid molecule encoding the envelope polypeptide domain.
[0015] 3. The system of embodiment 1 or 2, wherein the nucleic acid molecule of b), c), or of both of b) and c) are RNA.
[0016] 4. A cell-free system for modifying DNA comprising:
   [0017] a) a template RNA comprising a first LTR, a second LTR, and a heterologous object sequence encoding a therapeutic effector, positioned between the first LTR and the second LTR and optionally a primer binding site (PBS); or a DNA molecule encoding the template RNA;
   [0018] b) a first RNA encoding a retroviral structural polypeptide domain (e.g., gag);
   [0019] c) a second RNA encoding a retroviral reverse transcriptase polypeptide domain (e.g., pol) capable of reverse transcribing the template RNA, thereby producing a template DNA, or a nucleic acid molecule encoding the reverse transcriptase polypeptide domain; and
   [0020] wherein the first RNA sequence and the second RNA sequence are optionally part of the same nucleic acid molecule.
[0021] 5. The system of embodiment 4, wherein the system comprises neither an envelope polypeptide domain nor a nucleic acid molecule encoding the envelope polypeptide domain.
[0022] 6. The system of any of the preceding embodiments, wherein the structural polypeptide domain (e.g., gag) comprises a mutation relative to a corresponding wild type structural polypeptide domain.
[0023] 7. The system of any of the preceding embodiments, wherein the mutation in the structural polypeptide domain alters or decreases the cytoplasmic membrane localization of a component of the structural polypeptide domain (e.g., the gag protein, matrix protein, capsid protein, or nucleocapsid protein).
[0024] 8. The system of any of the preceding embodiments, wherein the mutation in the structural polypeptide domain alters the intracellular localization of a component of the structural polypeptide domain (e.g., the gag protein, matrix protein, capsid protein, or nucleocapsid protein) to be cytoplasmic or at the endoplasmic reticulum.
[0025] 9. The system of any of the preceding embodiments, wherein the mutation in the structural polypeptide domain reduces (e.g., eliminates) myristoylation of the structural polypeptide domain.
[0026] 10. The system of any of the preceding embodiments, wherein the structural polypeptide domain comprises a matrix protein domain (e.g., a retroviral matrix protein domain).
[0027] 11. The system of embodiment 10, wherein the matrix protein is encoded as a separate polypeptide from a further structural polypeptide domain (e.g., a capsid protein and/or a nucleocapsid protein).
[0028] 12. The system of embodiment 10, wherein the matrix protein is encoded as part of the polypeptide as a further structural polypeptide domain (e.g., a capsid protein and/or a nucleocapsid protein).
[0029] 13. The system of any of the preceding embodiments, wherein the structural polypeptide domain does not comprise a retroviral matrix protein domain.
[0030] 14. The system of any of the preceding embodiments, wherein the structural polypeptide domain comprises a capsid protein domain (e.g., a retroviral capsid protein domain).
[0031] 15. The system of embodiment 10, wherein the capsid protein is encoded as a separate polypeptide from a further structural polypeptide domain (e.g., a matrix protein and/or a nucleocapsid protein).
[0032] 16. The system of embodiment 10, wherein the capsid protein is encoded as part of the polypeptide as a further structural polypeptide domain (e.g., a matrix protein and/or a nucleocapsid protein).
[0033] 17. The system of any of the preceding embodiments, wherein the structural polypeptide domain does not comprise a retroviral capsid protein domain.
[0034] 18. The system of any of the preceding embodiments, wherein the structural polypeptide domain comprises a nucleocapsid protein domain (e.g., a retroviral nucleocapsid protein domain).
[0035] 19. The system of embodiment 10, wherein the nucleocapsid protein is encoded as a separate polypeptide from a further structural polypeptide domain (e.g., a matrix protein and/or a capsid protein).
[0036] 20. The system of embodiment 10, wherein the nucleocapsid protein is encoded as part of the polypeptide as a further structural polypeptide domain (e.g., a matrix protein and/or a capsid protein).
[0037] 21. The system of any of the preceding embodiments, wherein the structural polypeptide domain does not comprise a retroviral nucleocapsid protein domain.
[0038] 22. The system of any of the preceding embodiments, wherein the reverse transcriptase polypeptide domain comprises a reverse transcriptase domain.
[0039] 23. The system of embodiment 10, wherein the reverse transcriptase polypeptide domain is encoded as a separate polypeptide from a further polypeptide domain (e.g., an integrase protein, protease protein, dUTPase protein, viral accessory protein (e.g., vpr, vif, vpu, tat, rev, and/or nef), and/or ribonuclease H (RNase H) domain).
[0040] 24. The system of embodiment 10, wherein the reverse transcriptase polypeptide domain is encoded as part of the polypeptide as a second polypeptide domain (e.g., an integrase protein, protease protein, dUTPase protein, viral accessory protein (e.g., vpr, vif, vpu, tat, rev, and/or nef), and/or ribonuclease H (RNase H) domain).
[0041] 25. The system of any of the preceding embodiments, wherein the reverse transcriptase polypeptide domain comprises an integrase domain.
[0042] 26. The system of any of the preceding embodiments, wherein the reverse transcriptase polypeptide domain comprises a protease domain.
[0043] 27. The system of any of the preceding embodiments, wherein the reverse transcriptase polypeptide domain comprises a chromodomain.
[0044] 28. The system of any of the preceding embodiments, wherein the reverse transcriptase polypeptide domain does not comprise a chromodomain.
[0045] 29. A template RNA comprising:
   [0046] a first retrotransposon LTR,
   [0047] a second retrotransposon LTR,
   [0048] a heterologous object sequence encoding a therapeutic effector, positioned between the first LTR and the second LTR, and optionally, a primer binding site (PBS).
[0049] 30. A DNA molecule encoding the template RNA of embodiment 29.
[0050] 31. A method of delivering a heterologous object sequence to a target cell, comprising:
   [0051] a) introducing into the target cell (e.g., contacting the target cell with) a template RNA comprising a first LTR, a second LTR, and a heterologous object sequence encoding a therapeutic effector, positioned between the first LTR and the second LTR, and optionally a primer binding site (PBS); and
   [0052] b) introducing into the target cell (e.g., contacting the target cell with) an LTR retrotransposon structural polypeptide domain (e.g., gag), or a nucleic acid molecule encoding the structural polypeptide domain, and an LTR retrotransposon reverse transcriptase polypeptide domain (e.g., pol) capable of reverse transcribing the template RNA, thereby producing a template DNA, or a nucleic acid molecule encoding the reverse transcriptase polypeptide domain; and
   [0053] c) incubating the target cell under conditions suitable for production of the template DNA.
[0054] 32. A method of delivering a heterologous object sequence to a target cell, comprising:
   [0055] a) introducing into the target cell (e.g., contacting the target cell with) a template RNA comprising a first LTR, a second LTR, and a heterologous object sequence encoding a therapeutic effector, positioned between the first LTR and the second LTR, and optionally a primer binding site (PBS); and
   [0056] b) contacting the target cell with a first RNA encoding a retroviral structural polypeptide domain (e.g., gag) and a second RNA encoding a retroviral reverse transcriptase polypeptide domain (e.g., pol) capable of reverse transcribing the template RNA, thereby producing a template DNA, wherein the first RNA and the second RNA are optionally part of the same RNA molecule, and
   [0057] c) incubating the target cell under conditions suitable for production of the template DNA.
[0058] 33. The method of embodiment 32, wherein the first RNA and the second RNA overlap in sequence, e.g., wherein the coding region of the first RNA overlaps with the coding region of the second RNA.
[0059] 34. A method of delivering a heterologous object sequence to a target cell, comprising:
   [0060] a) introducing into the target cell (e.g., contacting the target cell with) a template RNA comprising a first LTR, a second LTR, and a heterologous object sequence encoding a therapeutic effector, positioned between the first LTR and the second LTR, and optionally a primer binding site (PBS); and
   [0061] b) introducing into the target cell (e.g., contacting the target cell with) a retroviral structural polypeptide domain (e.g., gag), or a nucleic acid molecule encoding the structural polypeptide domain and a retroviral reverse transcriptase polypeptide domain (e.g., pol) capable of reverse transcribing the template RNA, thereby producing a template DNA, or a nucleic acid molecule encoding the reverse transcriptase polypeptide domain; and
   [0062] c) incubating the target cell under conditions suitable for production of the template DNA;
   [0063] wherein the method does not comprise introducing into the target cell either of an envelope polypeptide domain or a nucleic acid molecule encoding the envelope polypeptide domain.
[0064] 35. A method of delivering a heterologous object sequence to a target cell of a patient in need thereof (e.g., in vivo or ex vivo delivery), comprising:
   [0065] a) introducing into the target cell (e.g., contacting the target cell with) a template RNA comprising a first LTR, a second LTR, and a heterologous object sequence encoding a therapeutic effector, positioned between the first LTR and the second LTR, and optionally a primer binding site (PBS); and
   [0066] b) contacting the target cell with a first polynucleotide encoding a retroviral structural polypeptide domain (e.g., gag), and a second polynucleotide encoding retroviral reverse transcriptase polypeptide domain (e.g., pol) capable of reverse transcribing the template RNA, thereby producing a template DNA, wherein the first polynucleotide and the second polynucleotide are optionally part of the same polynucleotide molecule; and
   [0067] c) incubating the target cell under conditions suitable for production of the template DNA.
[0068] 36. The method of embodiment 35, wherein the target cell comprises neither an envelope polypeptide domain heterologous to the target cell nor a nucleic acid molecule encoding the envelope polypeptide domain.
[0069] 37. The method of any of embodiments 31-36, wherein the method results in integration of the heterologous object sequence into the genome of the target cell.
[0070] 38. The method of any of embodiments 31-37, wherein the method results in integration of the heterologous object sequence into a specific site within the genome of the target cell.
[0071] 39. The method of any of embodiments 31-38, wherein the method results in integration of the heterologous object sequence into a random site within the genome of the target cell.
[0072] 40. The method of any of embodiments 31-39, wherein the method results in integration of the heterologous object sequence preferentially a site having one or more (e.g., 1, 2, 3, 4, 5, 6, 7, 8, 9, 10, 11, 12, 13, 14, 15, 16, or all 17) of the following characteristics:
   [0073] (i) about 1 kb upstream of a gene transcribed by RNA pol III;
   [0074] (ii) about 2-3 kb (e.g., about 2, 2.5, or 3 kb) upstream of a gene transcribed by RNA pol III;
   [0075] (iii) comprises a silent mating locus;
   [0076] (iv) positioned within 10, 20, 30, 40, 50, 60, 70, 80, 90, 100, 500, or 1000 bp of a telomere;
   [0077] (v) within a promoter, e.g., a promoter for a gene transcribed by RNA pol II;
   [0078] (vi) within heterochromatin;
   [0079] (vii) within an enhancer;
   [0080] (viii) within a transcriptional start site;
   [0081] (ix) within a gene-rich region of a chromosome;
   [0082] (x) within a chromosomal region proximal to the nuclear periphery;
   [0083] (xi) within a nucleosome-free region;
   [0084] (xii) within a site hypersensitive to DNAse I;
   [0085] (xiii) located about 40-150 bp (e.g., about 40, 50, 51, 52, 53, 54, 60, 70, 80, 90, 100, 110, 120, 130, 140, or 150 bp of a tRNA coding region);
   [0086] (xiv) within an exon;
   [0087] (xv) within an intron;
   [0088] (xvi) within a gene (e.g., having a parallel orientation to the gene or having an antiparallel orientation to the gene); and/or
   [0089] (xvii) within a region into which one or more of the following retrotransposons and/or retroviruses is capable of integrating: Ty1, Ty3, Ty5, Tf1, Maggy, MLV, HIV, or PFV.
[0090] 41. The method of any of embodiments 31-40, wherein the integration of the heterologous object sequence into the genome of the target cell results in one or more duplications at the integration site, e.g., duplications of 4-6 (e.g., 4, 5, or 6) nucleotides in length.
[0091] 42. The method of any of embodiments 31-41, wherein the target cell is a human cell.
[0092] 43. The method of any of embodiments 31-42, wherein the method results in production of an episome comprising the heterologous object sequence.
[0093] 44. The method of embodiment 43, wherein the episome replicates in the target cell
[0094] 45. The method of embodiment 43 or 44, wherein the episome comprises an origin of replication, e.g., a mammalian origin of replication, e.g., a human origin of replication.
[0095] 46. The method of any of embodiments 43-45, wherein the episome does not replicate in the target cell
[0096] 47. The method of any of embodiments 43-46, wherein the episome comprises one or two LTR sequences (e.g., comprises exactly one or exactly two LTR sequences).
[0097] 48. The method of any of embodiments 43-47, wherein the episome is formed by circularization of the template DNA, e.g., using endogenous machinery of the target cell, e.g., using non-homologous end joining, homologous recombination (e.g., by strand invasion or single strand annealing), closure of intermediate products of reverse transcription, auto-integration, or ligation.
[0098] 49. The method of any of embodiments 31-48, wherein the method results in production of an episome comprising the heterologous object sequence (thereby producing an episomal heterologous object sequence) and in integration of the heterologous object sequence into the genome of the target cell (thereby producing an integrated heterologous object sequence).
[0099] 50. The method of embodiment 49, wherein the number of copies of the episomal heterologous object sequence is greater than the number of copies of integrated heterologous object sequence, e.g., by at least 2, 3, 4, 5, 6, 7, 8, 9, 10, 15, 20, 25, 30, 40, 50, 60, 70, 80, 90, 100, 200, 300, 400, 500, 600, 700, 800, 900, 1000, 2000, 3000, 4000, 5000, 6000, 7000, 8000, 9000, or 10,000-fold.
[0100] 51. The method of embodiment 49, wherein the number of copies of the integrated heterologous object sequence is greater than the number of copies of episomal heterologous object sequence, e.g., by at least 2, 3, 4, 5, 6, 7, 8, 9, 10, 15, 20, 25, 30, 40, 50, 60, 70, 80, 90, 100, 200, 300, 400, 500, 600, 700, 800, 900, 1000, 2000, 3000, 4000, 5000, 6000, 7000, 8000, 9000, or 10,000-fold.
[0101] 52. The method of any of embodiments 31-51, wherein the method results in integration of the first LTR and the second LTR into the genome of the target cell.
[0102] 53. The method of embodiment 52, wherein the first LTR and the second LTR flank the heterologous object sequence after integration into the genome of the target cell.
[0103] 54. The method of any of embodiments 31-53, wherein the method results in formation of a VLP in the target cell, wherein the VLP comprises: the template RNA, the structural polypeptide domain, and the reverse transcriptase polypeptide domain.
[0104] 55. The method of embodiment 54, wherein the VLP further comprises one or more (e.g., 1, 2, 3, 4, 5, 6, or all 7) of: a matrix protein, nucleocapsid protein, capsid protein, reverse transcriptase protein, RNase H, protease, and integrase, e.g., of a retrovirus (e.g., a lentivirus) or a retrotransposon.
[0105] 56. The method of embodiment 54, wherein the structural polypeptide domain encloses the template RNA and the reverse transcriptase polypeptide domain.
[0106] 57. The method of any of embodiments 54-56, wherein the VLP enters the nucleus of the target cell, e.g., via a nuclear pore or via the endoplasmic reticulum.
[0107] 58. The method of any of embodiments 54-57, wherein the VLP is initially localized to the cytoplasm.
[0108] 59. The method of any of embodiments 54-58, wherein the VLP is initially localized to the endoplasmic reticulum (e.g., at the membrane of the endoplasmic reticulum).
[0109] 60. The method of any of embodiments 54-59, wherein the template DNA is imported into the nucleus of the target cell and the capsid protein of the VLP is not imported into the nucleus of the target cell.
[0110] 61. The method of embodiment 60, wherein the template DNA is injected into the nucleus of the target cell from the capsid protein of the VLP.
[0111] 62. The method of any of embodiments 31-61, wherein the method results in formation of a PIC in the target cell, wherein the PIC comprises: the template DNA, the structural polypeptide domain, and the reverse transcriptase polypeptide domain.
[0112] 63. The method of embodiment 62, wherein the structural polypeptide domain (e.g., a capsid protein) encloses the template DNA and the reverse transcriptase polypeptide domain.
[0113] 64. The method of any of embodiments 31-63, wherein the method results in formation of an intracisternal particle (IAP) or an intracytoplasmic A-type particle (ICAP) in the target cell, e.g., in the cytoplasm or in the endoplasmic reticulum.
[0114] 65. The method of any of embodiments 31-64, wherein the template RNA, the nucleic acid molecule encoding the structural polypeptide domain, and/or the nucleic acid molecule encoding the reverse transcriptase polypeptide domain are introduced into the target cell as RNA molecules (e.g., mRNAs).
[0115] 66. The method of any of embodiments 31-65, wherein the template RNA, the nucleic acid molecule encoding the structural polypeptide domain, and/or the nucleic acid molecule encoding the reverse transcriptase polypeptide domain are introduced into the target cell as DNA molecules (e.g., episomes).
[0116] 67. The method of any of embodiments 31-66, wherein the nucleic acid molecule encoding the structural polypeptide domain, and/or the nucleic acid molecule encoding the reverse transcriptase polypeptide domain are translated in the target cell, thereby producing the structural polypeptide domain and/or the reverse transcriptase polypeptide domain.
[0117] 68. The system, template RNA, DNA molecule, or method of any of the preceding embodiments, wherein the template RNA is not part of the same nucleic acid molecule as the nucleic acid molecule encoding the structural polypeptide domain.
[0118] 69. The system, template RNA, DNA molecule, or method of any of the preceding embodiments, wherein the template RNA is not part of the same nucleic acid molecule as the nucleic acid molecule encoding the reverse transcriptase polypeptide domain.
[0119] 70. The system, template RNA, DNA molecule, or method of any of the preceding embodiments, wherein the template RNA is not part of the same nucleic acid molecule as either of the nucleic acid molecule encoding the structural polypeptide domain and the nucleic acid molecule encoding the reverse transcriptase polypeptide domain.
[0120] 71. The system, template RNA, DNA molecule, or method of any of the preceding embodiments, wherein the structural polypeptide domain and the reverse transcriptase polypeptide domain are encoded on the same nucleic acid.
[0121] 72. The system, template RNA, DNA molecule, or method of any of the preceding embodiments, wherein the structural polypeptide domain and the reverse transcriptase polypeptide domain are encoded on different nucleic acids.
[0122] 73. The system, template RNA, DNA molecule, or method of any of the preceding embodiments, wherein the template RNA comprises a plurality of LTRs (e.g., exactly two LTRs).
[0123] 74. The system, template RNA, DNA molecule, or method of any of the preceding embodiments, wherein the plurality of LTRs comprised in the template RNA share at least 75%, 80%, 85%, 90%, 95%, 96%, 97%, 98%, or 99% sequence identity.
[0124] 75. The system, template RNA, DNA molecule, or method of any of the preceding embodiments, wherein the sequences of the plurality of LTRs comprised in the template RNA differ by no more than 1, 2, 3, 4, 5, 6, 7, 8, 9, 10, 20, 30, 40, 50, 60, 70, 80, 90, 100, 150, 200, 250, 300, 400, 500, 600, 700, 800, 900, or 1000 nucleotides.
[0125] 76. The system, template RNA, DNA molecule, or method of any of the preceding embodiments, wherein one or more (e.g., both) of the LTRs comprised in the template RNA are each at least 200, 300, 400, 500, 600, 700, 800, 900, 1000, 1100, 1200, 1300, or 1400 nucleotides in length.
[0126] 77. The system, template RNA, DNA molecule, or method of any of the preceding embodiments, wherein one or more (e.g., both) of the LTRs comprised in the template RNA are about 200-300, 300-400, 400-500, 500-600, 600-700, 700-800, 800-900, 900-1000, 1000-1100, 1100-1200, 1200-1300, or 1300-1400 nucleotides in length.
[0127] 78. The system, template RNA, DNA molecule, or method of any of the preceding embodiments, wherein one or more (e.g., both) of the LTRs comprised in the template RNA comprises a U3 region (e.g., having a length of about 200-300, 300-400, 400-500, 500-600, 600-700, 700-800, 800-900, 900-1000, 1000-1100, or 1100-1200 nucleotides).
[0128] 79. The system, template RNA, DNA molecule, or method of embodiment 78, wherein the U3 region is capable of being reverse transcribed by the reverse transcriptase polypeptide domain, e.g., to form a portion of the template DNA (e.g., a 3′ portion of the template DNA).
[0129] 80. The system, template RNA, DNA molecule, or method of embodiment 78 or 79, wherein the U3 region comprises a deletion relative to a wild-type U3 region (e.g., a deletion of at least 10, 20, 30, 40, 50, 60, 70, 80, 90, 100, 200, 300, or 400 nucleotides).
[0130] 81. The system, template RNA, DNA molecule, or method of any of the preceding embodiments, wherein one or more (e.g., both) of the LTRs comprised in the template RNA comprise a repeated region.
[0131] 82. The system, template RNA, DNA molecule, or method of embodiment 81, wherein the repeated region is capable of being reverse transcribed by the reverse transcriptase polypeptide domain, e.g., to form a portion of the template DNA.
[0132] 83. The system, template RNA, DNA molecule, or method of any of the preceding embodiments, wherein one or more (e.g., both) of the LTRs comprised in the template RNA comprises a U5 region (e.g., having a length of about 75-100, 100-125, 125-150, 150-175, 175-200, 200-225, or 225-250 nucleotides).
[0133] 84. The system, template RNA, DNA molecule, or method of embodiment 83, wherein the U5 region is capable of being reverse transcribed by the reverse transcriptase polypeptide domain, e.g., to form a portion of the template DNA (e.g., a 5′ portion of the template DNA).
[0134] 85. The system, template RNA, DNA molecule, or method of any of the preceding embodiments, wherein one or more (e.g., both) of the LTRs comprised in the template RNA have reduced promoter and/or enhancer activity relative to a wild-type LTR (e.g., reduced by at least 10%, 20%, 30%, 40%, 50%, 60%, 70%, 80%, 85%, 90%, 95%, 96%, 97%, 98%, 99%, or 100%).
[0135] 86. The system, template RNA, DNA molecule, or method of any of the preceding embodiments, wherein the plurality of LTRs comprised in the template RNA are identical.
[0136] 87. The system, template RNA, DNA molecule, or method of any of the preceding embodiments, wherein the first LTR is at the 5′ end of the template RNA, or less than 100, 90, 80, 70, 60, 50, 40, 30, 20, 10, 9, 8, 7, 6, 5, 4, 3, or 2 nucleotides from the 5′ end of the template RNA.
[0137] 88. The system, template RNA, DNA molecule, or method of any of the preceding embodiments, wherein the second LTR is at the 3′ end of the template RNA, or less than 2, 3, 4, 5, or 10 nucleotides from the 3′ end of the template RNA.
[0138] 89. The system, template RNA, DNA molecule, or method of any of the preceding embodiments, wherein the polynucleotide (e.g., RNA) encoding the retroviral structural polypeptide domain does not comprise an LTR or does not comprise an LTR within 500 bp, 1 kb, 1.5 kb, or 2 kb of its coding region.
[0139] 90. The system, template RNA, DNA molecule, or method of any of the preceding embodiments, wherein the polynucleotide (e.g., RNA) encoding the retroviral structural polypeptide domain does not comprise two LTRs or does not comprise two LTRs within 500 bp, 1 kb, 1.5 kb, or 2 kb of its coding region.
[0140] 91. The system, template RNA, DNA molecule, or method of any of the preceding embodiments, wherein the polynucleotide (e.g., RNA) encoding the reverse transcriptase polypeptide domain does not comprise an LTR or does not comprise an LTR within 500 bp, 1 kb, 1.5 kb, or 2 kb of its coding region.
[0141] 92. The system, template RNA, DNA molecule, or method of any of the preceding embodiments, wherein the polynucleotide (e.g., RNA) encoding the reverse transcriptase polypeptide domain does not comprise two LTRs or does not comprise two LTRs within 500 bp, 1 kb, 1.5 kb, or 2 kb of its coding region.
[0142] 93. The system, template RNA, DNA molecule, or method of any of the preceding embodiments, wherein the reverse transcriptase polypeptide domain (e.g., pol) comprises integrase activity, e.g., encodes a viral integrase, e.g., having an integrase amino acid sequence as listed in Table H1 or H2.
[0143] 94. The system, template RNA, DNA molecule, or method of any of the preceding embodiments, wherein the viral integrase specifically binds the first LTR and the second LTR.
[0144] 95. The system, template RNA, DNA molecule, or method of any of the preceding embodiments, wherein the template RNA comprises a primer-binding site (PBS).
[0145] 96. The system, template RNA, DNA molecule, or method of embodiment 95, wherein the PBS comprises the nucleic acid sequence of a PBS from an LTR retrotransposon or a retrovirus (e.g., a lentivirus, e.g., HIV), or a nucleic acid sequence having at least 75%, 80%, 85%, 90%, 95%, 96%, 97%, 98%, or 99% sequence identity thereto.
[0146] 97. The system, template RNA, DNA molecule, or method of embodiment 95 or 96, wherein the PBS is positioned downstream of the first LTR.
[0147] 98. The system, template RNA, DNA molecule, or method of any of embodiments 95-97, wherein the PBS is positioned upstream of the heterologous object sequence.
[0148] 99. The system, template RNA, DNA molecule, or method of any of embodiments 95-98, wherein the PBS can bind to an RNA endogenous to the target cell, e.g., a tRNA, e.g., a lysyl tRNA.
[0149] 100. The system, template RNA, DNA molecule, or method of any of the preceding embodiments, wherein the template RNA comprises a polypurine tract.
[0150] 101. The system, template RNA, DNA molecule, or method of embodiment 100, wherein the polypurine tract comprises the nucleic acid sequence of a polypurine tract from an LTR retrotransposon or a retrovirus (e.g., a lentivirus, e.g., HIV), or a nucleic acid sequence having at least 75%, 80%, 85%, 90%, 95%, 96%, 97%, 98%, or 99% sequence identity thereto.
[0151] 102. The system, template RNA, DNA molecule, or method of embodiment 100 or 101, wherein the polypurine tract is positioned downstream of the heterologous object sequence.
[0152] 103. The system, template RNA, DNA molecule, or method of any of embodiments 100-102, wherein the polypurine tract is positioned upstream of the second LTR.
[0153] 104. The system, template RNA, DNA molecule, or method of any of the preceding embodiments, wherein the template RNA comprises a promoter and/or an enhancer.
[0154] 105. The system, template RNA, DNA molecule, or method of embodiment 104, wherein the promoter comprises the nucleic acid sequence of a promoter from an LTR retrotransposon or a retrovirus (e.g., a lentivirus, e.g., HIV), or a nucleic acid sequence having at least 75%, 80%, 85%, 90%, 95%, 96%, 97%, 98%, or 99% sequence identity thereto.
[0155] 106. The system, template RNA, DNA molecule, or method of embodiment 104, wherein the promoter comprises the nucleic acid sequence of a promoter heterologous to an LTR retrotransposon or a retrovirus (e.g., a lentivirus, e.g., HIV), e.g., a constitutive promoter or a tissue-specific promoter.
[0156] 107. The system, template RNA, DNA molecule, or method of any of embodiments 104-107, wherein the promoter is positioned downstream of the primer binding site.
[0157] 108. The system, template RNA, DNA molecule, or method of any of embodiments 104-108, wherein the promoter is comprised by the heterologous object sequence.
[0158] 109. The system, template RNA, DNA molecule, or method of any of the preceding embodiments, wherein the template RNA comprises an open reading frame, e.g., encoding a therapeutic effector comprised by the heterologous object sequence.
[0159] 110. The system, template RNA, DNA molecule, or method of embodiment 109, wherein the open reading frame is positioned downstream of the promoter.
[0160] 111. The system, template RNA, DNA molecule, or method of any of embodiments 109-110, wherein the open reading frame is positioned upstream of the polypurine tract.
[0161] 112. The system, template RNA, DNA molecule, or method of any of embodiments 109-111, wherein the open reading frame is comprised in the heterologous object sequence.
[0162] 113. The system, template RNA, DNA molecule, or method of any of the preceding embodiments, wherein the template RNA comprises a dimerization initiation signal.
[0163] 114. The system, template RNA, DNA molecule, or method of embodiment 113, wherein the dimerization initiation signal is positioned downstream of the primer binding site.
[0164] 115. The system, template RNA, DNA molecule, or method of any of the preceding embodiments, wherein the template RNA comprises a packaging signal (Psi).
[0165] 116. The system, template RNA, DNA molecule, or method of any of the preceding embodiments, wherein the template RNA comprises a Rev-responsive element (RRE).
[0166] 117. The system, template RNA, DNA molecule, or method of embodiment 115 or 116, wherein the Psi and/or RRE positioned downstream of the dimerization initiation signal.
[0167] 118. The system, template RNA, DNA molecule, or method of embodiment 115 or 116, wherein the Psi and/or RRE positioned upstream of the heterologous object sequence.
[0168] 119. The system, template RNA, DNA molecule, or method of any of the preceding embodiments, wherein the template RNA comprises a post-transcriptional regulatory element.
[0169] 120. The system, template RNA, DNA molecule, or method of embodiment 119, wherein the post-transcriptional regulatory element is positioned downstream of the heterologous object sequence.
[0170] 121. The system, template RNA, DNA molecule, or method of embodiment 119, wherein the post-transcriptional regulatory element is positioned upstream of the polypurine tract.
[0171] 122. The system, template RNA, DNA molecule, or method of any of the preceding embodiments, wherein the template RNA comprises a gag gene, or a fragment thereof.
[0172] 123. The system, template RNA, DNA molecule, or method of any of the preceding embodiments, wherein the template RNA comprises one or more non-canonical or modified ribonucleotides.
[0173] 124. The system, template RNA, DNA molecule, or method of any of the preceding embodiments, wherein the nucleic acid molecule encoding the structural polypeptide domain comprises one or more non-canonical or modified ribonucleotides.
[0174] 125. The system, template RNA, DNA molecule, or method of any of the preceding embodiments, wherein the nucleic acid molecule encoding the reverse transcriptase polypeptide domain comprise one or more non-canonical or modified ribonucleotides.
[0175] 126. The system, template RNA, DNA molecule, or method of any of embodiments 123-125, wherein the modified ribonucleotides comprise chemically modified ribonucleotides.
[0176] 127. The system, template RNA, DNA molecule, or method of any of the preceding embodiments, wherein the template RNA is a circular RNA.
[0177] 128. The system, template RNA, DNA molecule, or method of any of the preceding embodiments, wherein the nucleic acid molecule encoding the structural polypeptide domain and/or the nucleic acid molecule encoding the reverse transcriptase polypeptide domain are circular RNAs.
[0178] 129. The system, template RNA, DNA molecule, or method of any of the preceding embodiments, wherein the template RNA comprises a non-translated cap (e.g., a 5′ cap).
[0179] 130. The system, template RNA, DNA molecule, or method of embodiment 129, wherein the non-translated cap comprises: a 5′ cap, e.g., a 5′ cap with cap-0, cap-1, or cap-2 structure, anti-reverse cap analog (ARCA) (m27.3′-OGP3G), GP3G (Unmethylated Cap Analog), m7GP3G (Monomethylated Cap Analog), m32.2.7GP3G (Trimethylated Cap Analog), a 7-methylguanosine cap (e.g., a 0-Me-m7G cap); a hypermethylated cap analog; an NAD+-derived cap analog (e.g., as described in Kiledjian, Trends in Cell Biology 28, 454-464 (2018)), a modified, e.g., biotinylated, cap analog (e.g., as described in Bednarek et al., Phil Trans R Soc B 373, 20180167 (2018)), or a cap as listed in Table M3.
[0180] 131. The system, template RNA, DNA molecule, or method of any of the preceding embodiments, wherein the template RNA comprises a non-translated tail (e.g., a poly-A tail).
[0181] 132. The system, template RNA, DNA molecule, or method of embodiment 131, wherein the non-translated tail comprises: a polyA tail, a 16-nucleotide long stem-loop structure flanked by unpaired 5 nucleotides (e.g., as described by Mannironi et al., Nucleic Acid Research 17, 9113-9126 (1989)), a triple-helical structure (e.g., as described by Brown et al., PNAS 109, 19202-19207 (2012)), a tRNA, Y RNA, or vault RNA structure (e.g., as described by Labno et al., Biochemica et Biophysica Acta 1863, 3125-3147 (2016)), or one or more deoxyribonucleotide triphosphates (dNTPs), 2′O-Methylated NTPs, or phosphorothioate-NTPs.
[0182] 133. The system, template RNA, DNA molecule, or method of any of the preceding embodiments, wherein the nucleic acid molecule encoding the structural polypeptide domain and/or the nucleic acid molecule encoding the reverse transcriptase polypeptide domain comprises a non-translated cap (e.g., a 5′ cap).
[0183] 134. The system, template RNA, DNA molecule, or method of any of the preceding embodiments, wherein the nucleic acid molecule encoding the structural polypeptide domain and/or the nucleic acid molecule encoding the reverse transcriptase polypeptide domain comprises a non-translated tail (e.g., a poly-A tail).
[0184] 135. The system, template RNA, DNA molecule, or method of any of the preceding embodiments, wherein the template RNA is single stranded.
[0185] 136. The system, template RNA, DNA molecule, or method of any of the preceding embodiments, wherein the nucleic acid molecule encoding the structural polypeptide domain and/or the nucleic acid molecule encoding the reverse transcriptase polypeptide domain are single stranded.
[0186] 137. The system, template RNA, DNA molecule, or method of any of the preceding embodiments, wherein the nucleic acid molecule encoding the structural polypeptide domain comprises an internal ribosome entry site (IRES).
[0187] 138. The system, template RNA, DNA molecule, or method of any of the preceding embodiments, wherein the nucleic acid molecule encoding the reverse transcriptase polypeptide domain comprises an internal ribosome entry site (IRES).
[0188] 139. The system, template RNA, DNA molecule, or method of any of the preceding embodiments, wherein the nucleic acid molecule encoding the structural polypeptide domain and the reverse transcriptase polypeptide domain comprises an internal ribosome entry site (IRES), e.g., positioned between the sequence encoding the structural polypeptide domain and the sequence encoding the reverse transcriptase polypeptide domain.
[0189] 140. The system, template RNA, DNA molecule, or method of any of the preceding embodiments, wherein the nucleic acid molecule encoding the structural polypeptide domain and the reverse transcriptase polypeptide domain comprises a small repetitive motif (e.g., comprising the nucleic acid sequence AAAAA), e.g., positioned between the sequence encoding the structural polypeptide domain and the sequence encoding the reverse transcriptase polypeptide domain.
[0190] 141. The system, template RNA, DNA molecule, or method of any of the preceding embodiments, wherein the nucleic acid molecule encoding the structural polypeptide domain and the reverse transcriptase polypeptide domain can hybridize to a tRNA (e.g., a tRNA capable of ribosomal stalling and slippage).
[0191] 142. The system, template RNA, DNA molecule, or method of any of the preceding embodiments, wherein the nucleic acid molecule encoding the structural polypeptide domain and the reverse transcriptase polypeptide domain does not comprise a nucleic acid sequence encoding a retroviral (e.g., lentiviral) env protein.
[0192] 143. The system, template RNA, DNA molecule, or method of any of the preceding embodiments, wherein the nucleic acid molecule encoding the structural polypeptide domain and the reverse transcriptase polypeptide domain does not comprise a nucleic acid sequence encoding a retroviral (e.g., lentiviral) vif, vpr, vpu, and/or nef protein.
[0193] 144. The system, template RNA, DNA molecule, or method of any of the preceding embodiments, wherein the nucleic acid molecule encoding the structural polypeptide domain and the reverse transcriptase polypeptide domain does not comprise a nucleic acid sequence encoding a retroviral (e.g., lentiviral) tat protein.
[0194] 145. The system, template RNA, DNA molecule, or method of any of the preceding embodiments, wherein the template RNA encodes an intron.
[0195] 146. The system, template RNA, DNA molecule, or method of embodiment 145, wherein the intron is positioned in the heterologous object sequence.
[0196] 147. The system, template RNA, DNA molecule, or method of embodiment 145 or 146, wherein the intron is oriented parallel relative to the template RNA.
[0197] 148. The system, template RNA, DNA molecule, or method of embodiment 145 or 146, wherein the intron is oriented antiparallel relative to the template RNA.
[0198] 149. The system, template RNA, DNA molecule, or method of any of the preceding embodiments, wherein the template RNA comprises one or more elements from MusD, Gypsy/Ty3, Copia/Ty1, Bel/Pao, Morgane, BARE2, Large Retrotransposon Derivative (LARD), Terminal-repeat Retrotransposon in Miniature (TRIM), IAP, or ETn, or a functional fragment or variant thereof, or a nucleic acid sequence having at least 75%, 80%, 85%, 90%, 95%, 96%, 97%, 98%, or 99% sequence identity thereto.
[0199] 150. The system, template RNA, DNA molecule, or method of any of the preceding embodiments, wherein the template RNA comprises one or more elements from a lentivirus (e.g., an HIV, e.g. HIV-1 or HIV-2), metavirus, pseudovirus, belpaovirus, betaretrovirus, picornavirus (e.g., enterovirus, e.g., enterovirus 71, coxsackievirus A16, or poliovirus), hepatovirus (e.g., a hepatitis virus, e.g., hepatitis A virus), calcivirus (e.g., norovirus or vesivirus), alphavirus (e.g., Semliki Forest virus, Sindbis virus, and Venezuelan equine encephalitis virus), flavivirus (e.g., Kunjin virus, yellow fever virus, West Nile virus, dengue virus, Zika virus, encephalitis virus, or hepacivirus, e.g., hepatitis C virus), coronavirus (e.g., murine hepatitis virus, SARS-CoV, or SARS-CoV-2), hepevirus (e.g., hepatitis E virus), reovirus, birnavirus (e.g., avibirnavirus), arenavirus, vesicular stomatitis virus, or a functional fragment or variant thereof, or a nucleic acid sequence having at least 75%, 80%, 85%, 90%, 95%, 96%, 97%, 98%, or 99% sequence identity thereto.
[0200] 151. The system, template RNA, DNA molecule, or method of any of the preceding embodiments, wherein the template RNA comprises one or more elements from an endogenous retrovirus (e.g., an endogenous retrovirus in the human genome or a mammalian genome).
[0201] 152. The system, template RNA, DNA molecule, or method of any of the preceding embodiments, wherein the template RNA, the structural polypeptide domain (or the nucleic acid molecule encoding the structural polypeptide domain), and the reverse transcriptase polypeptide domain (or the nucleic acid molecule encoding the reverse transcriptase polypeptide domain) are comprised in a lipid nanoparticle (LNP).
[0202] 153. The system, template RNA, DNA molecule, or method of any of the preceding embodiments, wherein the template RNA is comprised in an LNP.
[0203] 154. The system, template RNA, DNA molecule, or method of any of the preceding embodiments, wherein the structural polypeptide domain (or the nucleic acid molecule encoding the structural polypeptide domain) is comprised in an LNP.
[0204] 155. The system, template RNA, DNA molecule, or method of any of the preceding embodiments, wherein the reverse transcriptase polypeptide domain (or the nucleic acid molecule encoding the reverse transcriptase polypeptide domain) is comprised in an LNP.
[0205] 156. The system, template RNA, DNA molecule, or method of any of embodiments 152-155, wherein the template RNA, the structural polypeptide domain (or the nucleic acid molecule encoding the structural polypeptide domain), and the reverse transcriptase polypeptide domain (or the nucleic acid molecule encoding the reverse transcriptase polypeptide domain) are comprised in the same LNP.
[0206] 157. The system, template RNA, DNA molecule, or method of any of embodiments 152-155, wherein the template RNA, the structural polypeptide domain (or the nucleic acid molecule encoding the structural polypeptide domain), and the reverse transcriptase polypeptide domain (or the nucleic acid molecule encoding the reverse transcriptase polypeptide domain) are comprised in different LNPs.
[0207] 158. The system, template RNA, DNA molecule, or method of any of embodiments 152-155, wherein the template RNA and the structural polypeptide domain (or the nucleic acid molecule encoding the structural polypeptide domain) are comprised in different LNPs.
[0208] 159. The system, template RNA, DNA molecule, or method of any of embodiments 152-155, wherein the template RNA and the reverse transcriptase polypeptide domain (or the nucleic acid molecule encoding the reverse transcriptase polypeptide domain) are comprised in different LNPs.
[0209] 160. The system, template RNA, DNA molecule, or method of any of embodiments 152-155, wherein the structural polypeptide domain (or the nucleic acid molecule encoding the structural polypeptide domain), and the reverse transcriptase polypeptide domain (or the nucleic acid molecule encoding the reverse transcriptase polypeptide domain) are comprised in different LNPs.
[0210] 161. The system, template RNA, DNA molecule, or method of any of the preceding embodiments, wherein the template RNA is produced by a process comprising:
   [0211] providing a precursor RNA that comprises a self-cleaving ribozyme and a region comprising a sequence of the template RNA, and
   [0212] incubating the precursor RNA under conditions that allow for self-cleavage,
   [0213] thereby producing the template RNA.
[0214] 162. The system, template RNA, DNA molecule, or method of any of the preceding embodiments, wherein the template RNA is produced by a process comprising:
   [0215] providing a precursor RNA that comprises a region comprising a sequence of the template RNA and an oligonucleotide binding sequence,
   [0216] contacting the precursor RNA with an oligonucleotide that binds the oligonucleotide binding sequence,
   [0217] contacting the precursor RNA with RNaseH, and
   [0218] incubating the precursor RNA under conditions that allow RNAseH mediated cleavage,
   [0219] thereby producing the template RNA.
[0220] 163. The system, template RNA, DNA molecule, or method of any of the preceding embodiments, wherein the structural polypeptide domain and the reverse transcriptase polypeptide domain are part of the same polypeptide.
[0221] 164. The system, template RNA, DNA molecule, or method of any of the preceding embodiments, wherein the LTR retrotransposon structural polypeptide domain is a protein from MusD, Gypsy/Ty3, Copia/Ty1, Bel/Pao, Morgane, BARE2, Large Retrotransposon Derivative (LARD), Terminal-repeat Retrotransposon in Miniature (TRIM), IAP, or ETn, or a functional fragment or variant thereof, or a polypeptide having at least 75%, 80%, 85%, 90%, 95%, 96%, 97%, 98%, or 99% sequence identity thereto.
[0222] 165. The system, template RNA, DNA molecule, or method of any of the preceding embodiments, wherein the LTR retrotransposon reverse transcriptase polypeptide domain is a protein from MusD, Gypsy/Ty3, Copia/Ty1, Bel/Pao, Morgane, BARE2, Large Retrotransposon Derivative (LARD), Terminal-repeat Retrotransposon in Miniature (TRIM), IAP, or ETn, or a functional fragment or variant thereof, or a polypeptide having at least 75%, 80%, 85%, 90%, 95%, 96%, 97%, 98%, or 99% sequence identity thereto.
[0223] 166. The system, template RNA, DNA molecule, or method of any of the preceding embodiments, wherein the retroviral structural polypeptide domain is a protein from a lentivirus (e.g., an HIV, e.g. HIV-1 or HIV-2), metavirus, pseudovirus, belpaovirus, betaretrovirus, picornavirus (e.g., enterovirus, e.g., enterovirus 71, coxsackievirus A16, or poliovirus), hepatovirus (e.g., a hepatitis virus, e.g., hepatitis A virus), calcivirus (e.g., norovirus or vesivirus), alphavirus (e.g., Semliki Forest virus, Sindbis virus, and Venezuelan equine encephalitis virus), flavivirus (e.g., Kunjin virus, yellow fever virus, West Nile virus, dengue virus, Zika virus, encephalitis virus, or hepacivirus, e.g., hepatitis C virus), coronavirus (e.g., murine hepatitis virus, SARS-CoV, or SARS-CoV-2), hepevirus (e.g., hepatitis E virus), reovirus, birnavirus (e.g., avibirnavirus), arenavirus, vesicular stomatitis virus, or a functional fragment or variant thereof, or a polypeptide having at least 75%, 80%, 85%, 90%, 95%, 96%, 97%, 98%, or 99% sequence identity thereto.
[0224] 167. The system, template RNA, DNA molecule, or method of any of the preceding embodiments, wherein the retroviral reverse transcriptase polypeptide domain is a protein from a lentivirus (e.g., an HIV, e.g. HIV-1 or HIV-2), metavirus, pseudovirus, belpaovirus, betaretrovirus, picornavirus (e.g., enterovirus, e.g., enterovirus 71, coxsackievirus A16, or poliovirus), hepatovirus (e.g., a hepatitis virus, e.g., hepatitis A virus), calcivirus (e.g., norovirus or vesivirus), alphavirus (e.g., Semliki Forest virus, Sindbis virus, and Venezuelan equine encephalitis virus), flavivirus (e.g., Kunjin virus, yellow fever virus, West Nile virus, dengue virus, Zika virus, encephalitis virus, or hepacivirus, e.g., hepatitis C virus), coronavirus (e.g., murine hepatitis virus, SARS-CoV, or SARS-CoV-2), hepevirus (e.g., hepatitis E virus), reovirus, birnavirus (e.g., avibirnavirus), arenavirus, vesicular stomatitis virus, or a functional fragment or variant thereof, or a polypeptide having at least 75%, 80%, 85%, 90%, 95%, 96%, 97%, 98%, or 99% sequence identity thereto.
[0225] 168. The system, template RNA, DNA molecule, or method of any of the preceding embodiments, wherein the retroviral structural polypeptide domain is a protein encoded by an endogenous retrovirus (e.g., an endogenous retrovirus in the human genome).
[0226] 169. The system, template RNA, DNA molecule, or method of any of the preceding embodiments, wherein the retroviral reverse transcriptase polypeptide domain is a protein encoded by an endogenous retrovirus (e.g., an endogenous retrovirus in the human genome).
[0227] 170. The system, template RNA, DNA molecule, or method of any of the preceding embodiments, wherein the reverse transcriptase polypeptide domain is substantially unable to integrate the template DNA into a target DNA.
[0228] 171. The system, template RNA, DNA molecule, or method of embodiment 170, wherein the reverse transcriptase polypeptide domain has reduced integrase activity, e.g., to at least 50%, 40%, 30%, 20%, 10%, 5%, 2%, or 1% of that of a corresponding wild-type sequence, e.g., as measured in an assay as described in Moldt et al. 2008 (BMC Biotechnol. 8:60; incorporated herein by reference).
[0229] 172. The system, template RNA, DNA molecule, or method of embodiment 170 or 171, wherein the reverse transcriptase polypeptide domain comprises a mutation that reduces integrase activity, e.g., to at least 50%, 40%, 30%, 20%, 10%, 5%, 2%, or 1% of a corresponding wild-type sequence.
[0230] 173. The system, template RNA, DNA molecule, or method of any of the preceding embodiments, wherein the system further comprises, or wherein the method further comprises contacting the cell with, an inhibitor (e.g., a small molecule inhibitor) of wild-type viral integrase activity.
[0231] 174. The system, template RNA, DNA molecule, or method of any of the preceding embodiments, wherein the template RNA does not comprise a wild-type retroviral (e.g., lentiviral) attachment site at one or both ends.
[0232] 175. The system, template RNA, DNA molecule, or method of any of the preceding embodiments, wherein the system that does not comprise a nucleic acid molecule encoding the envelope polypeptide domain comprises a nonfunctional fragment of an env gene, e.g., a fragment of less than 2000, 1500, 1000, 900, 800, 700, 600, 500, 400, 300, 200, 100, 50, 40, 30, 20, or 10 contiguous nucleotides.
[0233] 176. The system, template RNA, DNA molecule, or method of any of the preceding embodiments, wherein the system that does not comprise a nucleic acid molecule encoding the envelope polypeptide domain comprises an env gene with a premature stop codon.
[0234] 177. The system, template RNA, DNA molecule, or method of any of the preceding embodiments, wherein the system that does not comprise a nucleic acid molecule encoding the envelope polypeptide domain comprises a nonfunctional env gene, e.g., comprising less than 2000, 1500, 1000, 900, 800, 700, 600, 500, 400, 300, 200, 100, 50, 40, 30, 20, or 10 contiguous nucleotides from the sequence of a wild-type env gene.
[0235] 178. The system, template RNA, DNA molecule, or method of any of the preceding embodiments, wherein the system that does not comprise a nucleic acid molecule encoding the envelope polypeptide domain the system does not comprise a functional env gene.
[0236] 179. The system, template RNA, DNA molecule, or method of any of the preceding embodiments, wherein the target cell is a mammalian cell (e.g., a human cell).
[0237] 180. The system, template RNA, DNA molecule, or method of any of the preceding embodiments, wherein the target cell is a primary cell.
[0238] 181. The system, template RNA, DNA molecule, or method of any of the preceding embodiments, wherein the target cell is not immortalized.
[0239] 182. The system, template RNA, DNA molecule, or method of any of the preceding embodiments, wherein the target cell is euploid.
[0240] 183. The system, template RNA, DNA molecule, or method of any of the preceding embodiments, wherein the target cell is comprised in a subject (e.g., a patient, e.g., a human patient).
[0241] 184. The system, template RNA, DNA molecule, or method of embodiment 183, wherein the template RNA, the nucleic acid molecule encoding the structural polypeptide domain, and/or the nucleic acid molecule encoding the reverse transcriptase polypeptide domain are introduced into the target cell via a lipid nanoparticle.
[0242] 185. The system, template RNA, DNA molecule, or method of any of the preceding embodiments, wherein the target cell is obtained from a subject (e.g., a patient, e.g., a human patient), e.g., wherein the target cell is a autologous to the subject.
[0243] 186. The system, template RNA, DNA molecule, or method of embodiment 185, wherein the template RNA, the nucleic acid molecule encoding the structural polypeptide domain, and/or the nucleic acid molecule encoding the reverse transcriptase polypeptide domain are introduced into the target cell via electroporation (e.g., via nucleofection).
[0244] 187. The system, template RNA, DNA molecule, or method of any of the preceding embodiments, wherein the template RNA or template DNA does not comprise a primer binding site.
[0245] 188. The system, template RNA, DNA molecule, or method of any of the preceding embodiments, wherein the template RNA or template DNA does not comprise a 3′ LTR.
[0246] 189. The system, template RNA, DNA molecule, or method of any of the preceding embodiments, wherein the template RNA or template DNA does not comprise a packaging signal, e.g., in a sequence encoding a structural polypeptide domain and/or in a sequence encoding a reverse transcriptase polypeptide domain.
[0247] 190. The system, template RNA, DNA molecule, or method of any of the preceding embodiments, wherein the template RNA or template DNA comprises an RNA-transport element (RTE) or a constitutive transport element (CTE).
[0248] 191. The system, template RNA, DNA molecule, or method of any of the preceding embodiments, wherein an RNA of the system (e.g., template RNA, the RNA encoding the polypeptide of (a), or an RNA expressed from a heterologous object sequence integrated into a target DNA) comprises a microRNA binding site, e.g., in a 3′ UTR.
[0249] 192. The system, template RNA, DNA molecule, or method of embodiment 191, wherein the microRNA binding site is recognized by a miRNA that is present in a non-target cell type, but that is not present (or is present at a reduced level relative to the non-target cell) in a target cell type.
[0250] 193. The system, template RNA, DNA molecule, or method of embodiment 191 or 192, wherein the miRNA is miR-142, and/or wherein the non-target cell is a Kupffer cell or a blood cell, e.g., an immune cell.
[0251] 194. The system, template RNA, DNA molecule, or method of embodiment 191 or 192, wherein the miRNA is miR-182 or miR-183, and/or wherein the non-target cell is a dorsal root ganglion neuron.
[0252] 195. The system, template RNA, DNA molecule, or method of any of embodiments 191-194, wherein the system comprises a first miRNA binding site that is recognized by a first miRNA (e.g., miR-142) and the system further comprises a second miRNA binding site that is recognized by a second miRNA (e.g., miR-182 or miR-183), wherein the first miRNA binding site and the second miRNA binding site are situated on the same RNA or on different RNAs of the system.
[0253] 196. The system, fusion protein, or method of any of the preceding embodiments, wherein the system, polypeptide, and/or DNA encoding the same, is formulated as a lipid nanoparticle (LNP).
[0254] 197. The system, fusion protein, or method of embodiment 196, wherein the lipid nanoparticle (or a formulation comprising a plurality of the lipid nanoparticles) lacks reactive impurities (e.g., aldehydes), or comprises less than a preselected level of reactive impurities (e.g., aldehydes).
[0255] 198. The system, fusion protein, or method of embodiment 196, wherein the lipid nanoparticle (or a formulation comprising a plurality of the lipid nanoparticles) lacks aldehydes, or comprises less than a preselected level of aldehydes.
[0256] 199. The system, fusion protein, or method of any of embodiments 196-198, wherein the lipid nanoparticle is comprised in a formulation comprising a plurality of the lipid nanoparticles.
[0257] 200. The system, fusion protein, or method of embodiment 199, wherein the lipid nanoparticle formulation is produced using one or more lipid reagents comprising less than 5%, 4%, 3%, 2%, 1%, 0.9%, 0.8%, 0.7%, 0.6%, 0.5%, 0.4%, 0.3%, 0.2%, or 0.1% total reactive impurity (e.g., aldehyde) content.
[0258] 201. The system, fusion protein, or method of embodiment 200, wherein the lipid nanoparticle formulation is produced using one or more lipid reagents comprising less than 3% total reactive impurity (e.g., aldehyde) content.
[0259] 202. The system, fusion protein, or method of any of embodiments 199-201, wherein the lipid nanoparticle formulation is produced using one or more lipid reagents comprising less than 5%, 4%, 3%, 2%, 1%, 0.9%, 0.8%, 0.7%, 0.6%, 0.5%, 0.4%, 0.3%, 0.2%, or 0.1% of any single reactive impurity (e.g., aldehyde) species.
[0260] 203. The system, fusion protein, or method of embodiment 202, wherein the lipid nanoparticle formulation is produced using one or more lipid reagent comprising less than 0.3% of any single reactive impurity (e.g., aldehyde) species.
[0261] 204. The system, fusion protein, or method of embodiment 202, wherein the lipid nanoparticle formulation is produced using one or more lipid reagents comprising less than 0.1% of any single reactive impurity (e.g., aldehyde) species.
[0262] 205. The system, fusion protein, or method of any of embodiments 199-204, wherein the lipid nanoparticle formulation comprises less than 5%, 4%, 3%, 2%, 1%, 0.9%, 0.8%, 0.7%, 0.6%, 0.5%, 0.4%, 0.3%, 0.2%, or 0.1% total reactive impurity (e.g., aldehyde) content.
[0263] 206. The system, fusion protein, or method of embodiment 205, wherein the lipid nanoparticle formulation comprises less than 3% total reactive impurity (e.g., aldehyde) content.
[0264] 207. The system, fusion protein, or method of any of embodiments 199-206, wherein the lipid nanoparticle formulation comprises less than 5%, 4%, 3%, 2%, 1%, 0.9%, 0.8%, 0.7%, 0.6%, 0.5%, 0.4%, 0.3%, 0.2%, or 0.1% of any single reactive impurity (e.g., aldehyde) species.
[0265] 208. The system, fusion protein, or method of embodiment 207, wherein the lipid nanoparticle formulation comprises less than 0.3% of any single reactive impurity (e.g., aldehyde) species.
[0266] 209. The system, fusion protein, or method of embodiment 207, wherein the lipid nanoparticle formulation comprises less than 0.1% of any single reactive impurity (e.g., aldehyde) species.
[0267] 210. The system, fusion protein, or method of any of embodiments 196-209, wherein one or more, or optionally all, of the lipid reagents used for a lipid nanoparticle as described herein or a formulation thereof comprise less than 5%, 4%, 3%, 2%, 1%, 0.9%, 0.8%, 0.7%, 0.6%, 0.5%, 0.4%, 0.3%, 0.2%, or 0.1% total reactive impurity (e.g., aldehyde) content.
[0268] 211. The system, fusion protein, or method of embodiment 210, wherein one or more, or optionally all, of the lipid reagents used for a lipid nanoparticle as described herein or a formulation thereof comprise less than 3% total reactive impurity (e.g., aldehyde) content.
[0269] 212. The system, fusion protein, or method of any of embodiments 196-211, wherein one or more, or optionally all, of the lipid reagents used for a lipid nanoparticle as described herein or a formulation thereof comprise less than 5%, 4%, 3%, 2%, 1%, 0.9%, 0.8%, 0.7%, 0.6%, 0.5%, 0.4%, 0.3%, 0.2%, or 0.1% of any single reactive impurity (e.g., aldehyde) species.
[0270] 213. The system, fusion protein, or method of embodiment 212, wherein one or more, or optionally all, of the lipid reagents used for a lipid nanoparticle as described herein or a formulation thereof comprise less than 0.3% of any single reactive impurity (e.g., aldehyde) species.
[0271] 214. The system, fusion protein, or method of embodiment 212, wherein one or more, or optionally all, of the lipid reagents used for a lipid nanoparticle as described herein or a formulation thereof comprise less than 0.1% of any single reactive impurity (e.g., aldehyde) species.
[0272] 215. The system, fusion protein, or method of any of embodiments 196-214, wherein the total aldehyde content and/or quantity of any single reactive impurity (e.g., aldehyde) species is determined by liquid chromatography (LC), e.g., coupled with tandem mass spectrometry (MS/MS), e.g., as described herein.
[0273] 216. The system, fusion protein, or method of any of embodiments 196-214, wherein the total aldehyde content and/or quantity of reactive impurity (e.g., aldehyde) species is determined by detecting one or more chemical modifications of a nucleic acid molecule (e.g., as described herein) associated with the presence of reactive impurities (e.g., aldehydes), e.g., in the lipid reagents.
[0274] 217. The system, fusion protein, or method of any of embodiments 196-214, wherein the total aldehyde content and/or quantity of aldehyde species is determined by detecting one or more chemical modifications of a nucleotide or nucleoside (e.g., a ribonucleotide or ribonucleoside, e.g., comprised in or isolated from a nucleic acid molecule, e.g., as described herein) associated with the presence of reactive impurities (e.g., aldehydes), e.g., in the lipid reagents, e.g., as described herein.
[0275] 218. The system, fusion protein, or method of embodiment 217, wherein the chemical modifications of a nucleic acid molecule, nucleotide, or nucleoside are detected by determining the presence of one or more modified nucleotides or nucleosides, e.g., using LC-MS/MS analysis, e.g., as described herein.
[0276] 219. A lipid nanoparticle (LNP) comprising the system, polypeptide (or RNA encoding the same), nucleic acid molecule, or DNA encoding the system or polypeptide, of any preceding embodiment.
[0277] 220. A system comprising a first lipid nanoparticle comprising the polypeptide (or DNA or RNA encoding the same) of a Gene Writing system (e.g., as described herein); and
   [0278] a second lipid nanoparticle comprising a nucleic acid molecule of a Gene Writing System (e.g., as described herein).
[0279] 221. The system, fusion protein, or method of any preceding embodiment, wherein the system, nucleic acid molecule, polypeptide, and/or DNA encoding the same, is formulated as a lipid nanoparticle (LNP).
[0280] 222. The LNP of embodiment 221, comprising a cationic lipid.
[0281] 223. The LNP of embodiment 221 or 222, wherein the cationic lipid has a structure according to:

[chemical structure]

[0282] 224. The LNP of any of embodiments 221-223, further comprising one or more neutral lipid, e.g., DSPC, DPPC, DMPC, DOPC, POPC, DOPE, SM, a steroid, e.g., cholesterol, and/or one or more polymer conjugated lipid, e.g., a pegylated lipid, e.g., PEG-DAG, PEG-PE, PEG-S-DAG, PEG-cer or a PEG dialkyoxypropylcarbamate.
[0283] 225. The system, fusion protein, or method of any of the preceding embodiments, wherein the system comprises one or more circular RNA molecules (circRNAs).
[0284] 226. The system, fusion protein, or method of embodiment 225, wherein the circRNA encodes the Gene Writer polypeptide.
[0285] 227. The system, fusion protein, or method of any of embodiments 225-226, wherein circRNA is delivered to a host cell.
[0286] 228. The system, fusion protein, or method of any of the preceding embodiments, wherein the circRNA is capable of being linearized, e.g., in a host cell, e.g., in the nucleus of the host cell.
[0287] 229. The system, fusion protein, or method of any of the preceding embodiments, wherein the circRNA comprises a cleavage site.
[0288] 230. The system, fusion protein, or method of embodiment 229, wherein the circRNA further comprises a second cleavage site.
[0289] 231. The system, fusion protein, or method of embodiment 229 or 230, wherein the cleavage site can be cleaved by a ribozyme, e.g., a ribozyme comprised in the circRNA (e.g., by autocleavage).
[0290] 232. The system, fusion protein, or method of any of the preceding embodiments, wherein the circRNA comprises a ribozyme sequence.
[0291] 233. The system, fusion protein, or method of embodiment 232, wherein the ribozyme sequence is capable of autocleavage, e.g., in a host cell, e.g., in the nucleus of the host cell.
[0292] 234. The system, fusion protein, or method of any of embodiments 232-233, wherein the ribozyme is an inducible ribozyme.
[0293] 235. The system, fusion protein, or method of any of embodiments 232-234 wherein the ribozyme is a protein-responsive ribozyme, e.g., a ribozyme responsive to a nuclear protein, e.g., a genome-interacting protein, e.g., an epigenetic modifier, e.g., EZH2.
[0294] 236. The system, fusion protein, or method of any of embodiments 232-235, wherein the ribozyme is a nucleic acid-responsive ribozyme.
[0295] 237. The system, fusion protein, or method of embodiment 236, wherein the catalytic activity (e.g., autocatalytic activity) of the ribozyme is activated in the presence of a target nucleic acid molecule (e.g., an RNA molecule, e.g., an mRNA, miRNA, ncRNA, lncRNA, tRNA, snRNA, or mtRNA).
[0296] 238. The system, fusion protein, or method of any of embodiments 232-235, wherein the ribozyme is responsive to a target protein (e.g., an MS2 coat protein).
[0297] 239. The system, fusion protein, or method of embodiment 238, wherein the target protein localized to the cytoplasm or localized to the nucleus (e.g., an epigenetic modifier or a transcription factor).
[0298] 240. The system, fusion protein, or method of any of embodiments 232-236, wherein the ribozyme comprises the ribozyme sequence of a B2 or ALU retrotransposon, or a nucleic acid sequence having at least 85%, 90%, 95%, 96%, 97%, 98%, or 99% sequence identity thereto.
[0299] 241. The system, fusion protein, or method of any of embodiments 232-236, wherein the ribozyme comprises the sequence of a tobacco ringspot virus hammerhead ribozyme, or a nucleic acid sequence having at least 85%, 90%, 95%, 96%, 97%, 98%, or 99% sequence identity thereto.
[0300] 242. The system, fusion protein, or method of any of embodiments 232-236, wherein the ribozyme comprises the sequence of a hepatitis delta virus (HDV) ribozyme, or a nucleic acid sequence having at least 85%, 90%, 95%, 96%, 97%, 98%, or 99% sequence identity thereto.
[0301] 243. The system, fusion protein, or method of any of embodiments 232-242, wherein the ribozyme is activated by a moiety expressed in a target cell or target tissue.
[0302] 244. The system, fusion protein, or method of any of embodiments 232-243, wherein the ribozyme is activated by a moiety expressed in a target subcellular compartment (e.g., a nucleus, nucleolus, cytoplasm, or mitochondria).
[0303] 245. The system, fusion protein, or method of any of the preceding embodiments, wherein the ribozyme is comprised in a circular RNA or a linear RNA.
[0304] 246. A system comprising a first circular RNA encoding the polypeptide of a Gene Writing system; and a second circular RNA comprising the template RNA of a Gene Writing system.
[0305] 247. The system of any of the preceding embodiments, wherein the template RNA, e.g., the 5′ UTR, comprises a ribozyme which cleaves the template RNA (e.g., in the 5′ UTR).
[0306] 248. The system of any of the preceding embodiments, wherein the template RNA comprises a ribozyme that is heterologous to (a)(i), (a)(ii), (b)(i), or a combination thereof.
[0307] 249. The system of any of the preceding embodiments, wherein the heterologous ribozyme is capable of cleaving RNA comprising the ribozyme, e.g., 5′ of the ribozyme, 3′ of the ribozyme, or within the ribozyme.
[0308] 250. A method of making a system for modifying DNA (e.g., as described herein), the method comprising:
   [0309] (a) providing a template nucleic acid (e.g., a template RNA or DNA) comprising a heterologous homology sequence having at least 85%, 90%, 95%, 96%, 97%, 98%, 99%, or 100% homology to a sequence comprised in a target DNA molecule, and/or
   [0310] (b) providing a polypeptide of the system (e.g., comprising a DNA-binding domain (DBD) and/or an endonuclease domain) comprising a heterologous targeting domain that binds specifically to a sequence comprised in the target DNA molecule.
[0311] 251. The method of embodiment 250, wherein:
   [0312] (a) comprises introducing into the template nucleic acid (e.g., a template RNA or DNA) a heterologous homology sequence having at least 85%, 90%, 95%, 96%, 97%, 98%, 99%, or 100% homology to the sequence comprised in a target DNA molecule, and/or
   [0313] (b) comprises introducing into the polypeptide of the system (e.g., comprising a DNA-binding domain (DBD) and/or an endonuclease domain) the heterologous targeting domain that binds specifically to a sequence comprised in the target DNA molecule.
[0314] 252. The method of embodiment 251, wherein the introducing of (a) comprises inserting the homology sequence into the template nucleic acid.
[0315] 253. The method of embodiment 251, wherein the introducing of (a) comprises replacing a segment of the template nucleic acid with the homology sequence.
[0316] 254. The method of embodiment 251, wherein the introducing of (a) comprises mutating one or more nucleotides (e.g., at least 2, 3, 4, 5, 10, 15, 20, 25, 30, 35, 40, 50, 60, 70, 80, 90, or 100 nucleotides) of the template nucleic acid, thereby producing a segment of the template nucleic acid having the sequence of the homology sequence.
[0317] 255. The method of embodiment 251, wherein the introducing of (b) comprises inserting the amino acid sequence of the targeting domain into the amino acid sequence of the polypeptide.
[0318] 256. The method of embodiment 255, wherein the introducing of (b) comprises inserting a nucleic acid sequence encoding the targeting domain into a coding sequence of the polypeptide comprised in a nucleic acid molecule.
[0319] 257. The method of embodiment 255, wherein the introducing of (b) comprises replacing at least a portion of the polypeptide with the targeting domain.
[0320] 258. The method of embodiment 251, wherein the introducing of (a) comprises mutating one or more amino acids (e.g., at least 1, 2, 3, 4, 5, 6, 7, 8, 9, 10, 15, 20, 25, 30, 40, 50, 60, 70, 80, 90, 100, 150, 200, 250, 300, 400, 500, or more amino acids) of the polypeptide.
[0321] 259. A method for modifying a target site in genomic DNA in a cell, the method comprising contacting the cell with:
   [0322] (a) a polypeptide or a nucleic acid encoding the polypeptide, wherein the polypeptide comprises (i) a reverse transcriptase (RT) domain, (ii) a DNA-binding domain (DBD); and (iii) an endonuclease domain, e.g., a nickase domain; and
   [0323] (b) a template RNA (or DNA encoding the template RNA) comprising (e.g., from 5′ to 3′) (i) optionally a sequence that binds the target site (e.g., a second strand of a site in a target genome), (ii) optionally a sequence that binds the polypeptide, (iii) a heterologous object sequence, and (iv) a 3′ target homology domain,
   [0324] wherein:
      [0325] (i) the polypeptide comprises a heterologous targeting domain (e.g., in the DBD or the endonuclease domain) that binds specifically to a sequence comprised in or adjacent to the target site of the genomic DNA; and/or
      [0326] (ii) the template RNA comprises a heterologous homology sequence having at least 85%, 90%, 95%, 96%, 97%, 98%, 99%, or 100% homology to a sequence comprised in or adjacent to the target site of the genomic DNA;
   [0327] thereby modifying the target site in genomic DNA in a cell.
[0328] 260. A system for modifying DNA comprising:
   [0329] (a) a polypeptide or a nucleic acid encoding the polypeptide, wherein the polypeptide comprises (i) a reverse transcriptase (RT) domain, (ii) a DNA-binding domain (DBD); and (iii) an endonuclease domain, e.g., a nickase domain; and
   [0330] (b) a template RNA (or DNA encoding the template RNA) comprising (e.g., from 5′ to 3′) (i) optionally a sequence that binds a target site (e.g., a second strand of a site in a target genome), (ii) optionally a sequence that binds the polypeptide, (iii) a heterologous object sequence, and (iv) a 3′ target homology domain;
   [0331] wherein:
      [0332] (i) the polypeptide comprises a heterologous targeting domain (e.g., in the DBD or the endonuclease domain) that binds specifically to a sequence comprised in the target site; and/or
      [0333] (ii) the template RNA comprises a heterologous homology sequence having at least 85%, 90%, 95%, 96%, 97%, 98%, 99%, or 100% homology to a sequence comprised in a target site.
[0334] 261. A template RNA (or DNA encoding the template RNA) comprising a targeting domain (e.g., a heterologous targeting domain) that binds specifically to a sequence comprised in the target DNA molecule (e.g., a genomic DNA), a sequence that specifically binds an RT domain of a polypeptide, and a heterologous object sequence.
[0335] 262. A polypeptide or a nucleic acid encoding the polypeptide, wherein the polypeptide comprises (i) a reverse transcriptase (RT) domain, (ii) a DNA-binding domain (DBD); and (iii) an endonuclease domain; wherein the DBD and/or the endonuclease domain comprise a heterologous targeting domain that binds specifically to a sequence comprised in a target DNA molecule (e.g., a genomic DNA).
[0336] 263. The system, fusion protein, or method of any of the preceding embodiments, wherein the polypeptide comprises a heterologous targeting domain that binds specifically to a sequence comprised in the target DNA molecule (e.g., a genomic DNA).
[0337] 264. The system, fusion protein, or method of embodiment 263, wherein the heterologous target domain binds to a different nucleic acid sequence than the unmodified polypeptide.
[0338] 265. The system, fusion protein, or method of embodiment 263 or 264, wherein the polypeptide does not comprise a functional endogenous targeting domain (e.g., wherein the polypeptide does not comprise an endogenous targeting domain).
[0339] 266. The system, fusion protein, or method of any of embodiments 263-265, wherein the heterologous targeting domain comprises a zinc finger (e.g., a zinc finger that binds specifically to the sequence comprised in the target DNA molecule).
[0340] 267. The system, fusion protein, or method of any of embodiments 263-266, wherein the heterologous targeting domain comprises a Cas domain (e.g., a Cas9 domain, or a mutant or variant thereof, e.g., a Cas9 domain that binds specifically to the sequence comprised in the target DNA molecule).
[0341] 268. The system, fusion protein, or method of embodiment 267, wherein the Cas domain is associated with a guide RNA (gRNA).
[0342] 269. The system, fusion protein, or method of any of embodiments 623-268, wherein the heterologous targeting domain comprises an endonuclease domain (e.g., a heterologous endonuclease domain).
[0343] 270. The system, fusion protein, or method of embodiment 269, wherein the endonuclease domain comprises a Cas domain (e.g., a Cas9 or a mutant or variant thereof).
[0344] 271. The system, fusion protein, or method of embodiment 270, wherein the Cas domain is associated with a guide RNA (gRNA).
[0345] 272. The system, fusion protein, or method of embodiment 269, wherein the endonuclease domain comprises a Fok1 domain.
[0346] 273. The system, fusion protein, or method of any of the preceding embodiments, wherein the template nucleic acid molecule comprises at least one (e.g., one or two) heterologous homology sequence having at least 85%, 90%, 95%, 96%, 97%, 98%, 99%, or 100% homology to a sequence comprised in a target DNA molecule (e.g., a genomic DNA).
[0347] 274. The system, fusion protein, or method of embodiment 273, wherein one of the at least one heterologous homology sequences is positioned at or within about 1, 2, 3, 4, 5, 6, 7, 8, 9, 10, 15, 20, 25, 30, 35, 40, 45, 50, 60, 70, 80, 90, or 100 nucleotides of the 5′ end of the template nucleic acid molecule.
[0348] 275. The system, fusion protein, or method of embodiment 273 or 274, wherein one of the at least one heterologous homology sequences is positioned at or within about 1, 2, 3, 4, 5, 6, 7, 8, 9, 10, 15, 20, 25, 30, 35, 40, 45, 50, 60, 70, 80, 90, or 100 nucleotides of the 3′ end of the template nucleic acid molecule.
[0349] 276. The system, fusion protein, or method of embodiment 275, wherein the heterologous homology sequence binds within 1, 2, 3, 4, 5, 6, 7, 8, 9, or 10 nucleotides of a nick site (e.g., produced by a nickase, e.g., an endonuclease domain, e.g., as described herein) in the target DNA molecule.
[0350] 277. The system, fusion protein, or method of embodiment 273, wherein the heterologous homology sequence has less than 50%, 40%, 30%, 20%, 10%, 5%, 4%, 3%, 2%, or 1% sequence identity with a nucleic acid sequence complementary to an endogenous homology sequence of an unmodified form of the template RNA.
[0351] 278. The system, fusion protein, or method of embodiment 277, wherein the heterologous homology sequence has having at least 85%, 90%, 95%, 96%, 97%, 98%, 99%, or 100% homology to a sequence of the target DNA molecule that is different the sequence bound by an endogenous homology sequence (e.g., replaced by the heterologous homology sequence).
[0352] 279. The system, fusion protein, or method of embodiment 273 or 277, wherein the heterologous homology sequence comprises a sequence (e.g., at its 3′ end) having at least 85%, 90%, 95%, 96%, 97%, 98%, 99%, or 100% homology to a sequence positioned 5′ to a nick site of the target DNA molecule (e.g., a site nicked by a nickase, e.g., an endonuclease domain as described herein).
[0353] 280. The system, fusion protein, or method of any of embodiments 273-279, wherein the heterologous homology sequence comprises a sequence (e.g., at its 5′ end) suitable for priming target-primed reverse transcription (TPRT) initiation.
[0354] 281. The system, fusion protein, or method of any of embodiments 273-280, wherein the heterologous homology sequence has at least 85%, 90%, 95%, 96%, 97%, 98%, 99%, or 100% homology to a sequence positioned within about 1, 2, 3, 4, 5, 6, 7, 8, 9, 10, 15, 20, 25, 30, 35, 40, 45, 50, 60, 70, 80, 90, or 100 nucleotides of (e.g., 3′ relative to) a target insertion site, e.g., for a heterologous object sequence (e.g., as described herein), in the target DNA molecule.
[0355] 282. The system, fusion protein, or method of any of embodiments 273-281, wherein the template nucleic acid molecule comprises a guide RNA (gRNA), e.g., as described herein.
[0356] 283. The system, fusion protein, or method of embodiment 282, wherein the template nucleic acid molecule comprises a gRNA spacer sequence (e.g., at or within 1, 2, 3, 4, 5, 10, 15, 20, 25, 30, 40, 50, 60, 70, 80, 90, or 100 nucleotides of its 5′ end).
[0357] 284. A template RNA (or DNA encoding the template RNA) comprising (e.g., from 5′ to 3′) (i) a sequence that binds a target site (e.g., a second strand of a site in a target genome), (ii) a sequence that specifically binds an RT domain of a polypeptide, (iii) a heterologous object sequence, and (iv) a 3′ target homology domain.
[0358] 285. The template RNA of embodiment 284, further comprising (v) a sequence that binds an endonuclease and/or a DNA-binding domain of a polypeptide (e.g., the same polypeptide comprising the RT domain).
[0359] 286. The template RNA of either of embodiments 284 or 285, wherein the RT domain comprises a sequence selected of Table 1 or 3 or a sequence of a reverse transcriptase domain of Table 2 or a sequence that has at least 70%, 75%, 80%, 85%, 90%, 95%, 96%, 97%, 98%, or 99% identity thereto.
[0360] 287. The template RNA of any of embodiments 284-286, wherein the RT domain comprises a sequence selected of Table 1 or 3 or a sequence of a reverse transcriptase domain of Table 2, wherein the RT domain further comprises a number of substitutions relative to the natural sequence, e.g., at least 1, 2, 3, 4, 5, 10, 20, 30, 40, 50, 60, 70, 80, 90, or 100 substitutions.
[0361] 288. The template RNA of embodiments 284-287, wherein the sequence of (ii) specifically binds the RT domain.
[0362] 289. The template RNA of any of embodiments 284-288, wherein the sequence that specifically binds the RT domain is a sequence, e.g., a UTR sequence, of Table 1 or from a domain of Table 2, or a sequence having at least 70, 75, 80, 85, 90, 95, or 99% identity thereto.
[0363] 290. A template RNA (or DNA encoding the template RNA) comprising from 5′ to 3′: (ii) a sequence that binds an endonuclease and/or a DNA-binding domain of a polypeptide, (i) a sequence that binds a target site (e.g., a second strand of a site in a target genome), (iii) a heterologous object sequence, and (iv) a 3′ target homology domain.
[0364] 291. A template RNA (or DNA encoding the template RNA) comprising from 5′ to 3′: (iii) a heterologous object sequence, (iv) a 3′ target homology domain, (i) a sequence that binds a target site (e.g., a second strand of a site in a target genome), and (ii) a sequence that binds an endonuclease and/or a DNA-binding domain of a polypeptide.
[0365] 292. The system, template RNA, DNA molecule, or method of any of the preceding embodiments, wherein the template RNA comprises at least 2, 3, or 4 miRNA binding sites, e.g., wherein the miRNA binding sites are recognized by the same or different miRNAs.
[0366] 293. The system, template RNA, DNA molecule, or method of any of the preceding embodiments, wherein the RNA encoding the polypeptide of (a) comprises at least 2, 3, or 4 miRNA binding sites, e.g., wherein the miRNA binding sites are recognized by the same or different miRNAs.
[0367] 294. The system, template RNA, DNA molecule, or method of any of the preceding embodiments, wherein the RNA expressed from a heterologous object sequence integrated into a target DNA comprises at least 2, 3, or 4 miRNA binding sites, e.g., wherein the miRNA binding sites are recognized by the same or different miRNAs.
[0368] 295. The system, template RNA, DNA molecule, or method of any of the preceding embodiments, wherein the system comprises one or more elements comprising a sequence as set out in Table S1, or a sequence having at least 70%, 75%, 80%, 85%, 90%, 95%, 96%, 97%, 98%, or 99% identity thereto.
[0369] 296. The system, template RNA, DNA molecule, or method of any of the preceding embodiments, wherein the system comprises one or more elements comprising a sequence as set out in Table S2, or a sequence having at least 70%, 75%, 80%, 85%, 90%, 95%, 96%, 97%, 98%, or 99% identity thereto.
[0370] 297. The system, template RNA, DNA molecule, or method of any of the preceding embodiments, wherein the system comprises one or more elements comprising a sequence as set out in Table S3, or a sequence having at least 70%, 75%, 80%, 85%, 90%, 95%, 96%, 97%, 98%, or 99% identity thereto.
[0371] 298. The system, template RNA, DNA molecule, or method of any of the preceding embodiments, wherein the system comprises one or more elements comprising a sequence as set out in Table S4, or a sequence having at least 70%, 75%, 80%, 85%, 90%, 95%, 96%, 97%, 98%, or 99% identity thereto.
[0372] 299. The system, template RNA, DNA molecule, or method of any of the preceding embodiments, wherein the system comprises one or more elements comprising a sequence as set out in Table S5, or a sequence having at least 70%, 75%, 80%, 85%, 90%, 95%, 96%, 97%, 98%, or 99% identity thereto.
[0373] 300. The system, template RNA, DNA molecule, or method of any of the preceding embodiments, wherein the template RNA, the nucleic acid molecule encoding the structural polypeptide domain, and the nucleic acid molecule encoding the reverse transcriptase polypeptide domain are comprised in the same nucleic acid molecule.
[0374] 301. The system, template RNA, DNA molecule, or method of any of the preceding embodiments, wherein the template RNA and the nucleic acid molecules encoding the structural polypeptide domain and/or the reverse transcriptase polypeptide domain are comprised in different nucleic acid molecules.

### Definitions

[0375] About, approximately: “About” or “approximately” as the terms are used herein applied to one or more values of interest, refer to a value that is similar to a stated reference value. In certain embodiments, the term “approximately” or “about” refers to a range of values that fall within 15%, 14%, 13%, 12%, 11%, 10%, 9%, 8%, 7%, 6%, 5%, 4%, 3%, 2%, 1%, or less in either direction (greater than or less than) of the stated reference value unless otherwise stated or otherwise evident from the context (except where such number would exceed 100% of a possible value).

[0376] Domain: The term “domain” as used herein refers to a structure of a biomolecule that contributes to a specified function of the biomolecule. A domain may comprise a contiguous region (e.g., a contiguous sequence) or distinct, non-contiguous regions (e.g., non-contiguous sequences) of a biomolecule. Examples of protein domains include, but are not limited to, a nuclear localization sequence, a recombinase domain, a retroviral (e.g., endogenous retroviral) structural polypeptide domain, a retroviral (e.g., endogenous retroviral) reverse transcriptase polypeptide domain, a retrotransposon structural polypeptide domain, a retrotransposon reverse transcriptase polypeptide domain, a DNA recognition domain (e.g., that binds to or is capable of binding to a recognition site, e.g. as described herein), a recombinase N-terminal domain (also called a catalytic domain), a C-terminal zinc ribbon domain. In some embodiments the zinc ribbon domain further comprises a coiled-coiled motif. In some embodiments, the recombinase domain and the zinc ribbon domain are collectively referred to as the C-terminal domain. In some embodiments the N-terminal domain is linked to the C-terminal domain by an aE linker or helix. In some embodiments the N-terminal domain is between 50 and 250 amino acids, or 100-200 amino acids, or 130-170 amino acids, e.g., about 150 amino acids. In some embodiments the C-terminal domain is 200-800 amino acids, or 300-500 amino acids. In some embodiments the recombinase domain is between 50 and 150 amino acids. In some embodiments the zinc ribbon domain is between 30 and 100 amino acids; an example of a domain of a nucleic acid is a regulatory domain, such as a transcription factor binding domain, a recognition sequence, an arm of a recognition sequence (e.g. a 5′ or 3′ arm), a core sequence, or an object sequence (e.g., a heterologous object sequence).

[0377] Exogenous: As used herein, the term exogenous, when used with reference to a biomolecule (such as a nucleic acid sequence or polypeptide) means that the biomolecule was introduced into a host genome, cell or organism by the hand of man. For example, a nucleic acid that is as added into an existing genome, cell, tissue or subject using recombinant DNA techniques or other methods is exogenous to the existing nucleic acid sequence, cell, tissue or subject.

[0378] Genomic safe harbor site (GSH site): A genomic safe harbor site is a site in a host genome that is able to accommodate the integration of new genetic material, e.g., such that the inserted genetic element does not cause significant alterations of the host genome posing a risk to the host cell or organism. A GSH site generally meets 1, 2, 3, 4, 5, 6, 7, 8 or 9 of the following criteria: (i) is located >300 kb from a cancer-related gene; (ii) is >300 kb from a miRNA/other functional small RNA; (iii) is >50 kb from a 5′ gene end; (iv) is >50 kb from a replication origin; (v) is >50 kb away from any ultraconservered element; (vi) has low transcriptional activity (i.e. no mRNA+/−25 kb); (vii) is not in copy number variable region; (viii) is in open chromatin; and/or (ix) is unique, with 1 copy in the human genome. Examples of GSH sites in the human genome that meet some or all of these criteria include (i) the adeno-associated virus site 1 (AAVS1), a naturally occurring site of integration of AAV virus on chromosome 19; (ii) the chemokine (C-C motif) receptor 5 (CCR5) gene, a chemokine receptor gene known as an HIV-1 coreceptor; (iii) the human ortholog of the mouse Rosa26 locus; (iv) the rDNA locus. Additional GSH sites are known and described, e.g., in Pellenz et al. epub Aug. 20, 2018 (https://doi.org/10.1101/396390).

[0379] Heterologous: The term heterologous, when used to describe a first element in reference to a second element means that the first element and second element do not exist in nature disposed as described. For example, a heterologous polypeptide, nucleic acid molecule, construct or sequence refers to (a) a polypeptide, nucleic acid molecule or portion of a polypeptide or nucleic acid molecule sequence that is not native to a cell in which it is expressed, (b) a polypeptide or nucleic acid molecule or portion of a polypeptide or nucleic acid molecule that has been altered or mutated relative to its native state, or (c) a polypeptide or nucleic acid molecule with an altered expression as compared to the native expression levels under similar conditions. For example, a heterologous regulatory sequence (e.g., promoter, enhancer) may be used to regulate expression of a gene or a nucleic acid molecule in a way that is different than the gene or a nucleic acid molecule is normally expressed in nature. In another example, a heterologous domain of a polypeptide or nucleic acid sequence (e.g., a DNA binding domain of a polypeptide or nucleic acid encoding a DNA binding domain of a polypeptide) may be disposed relative to other domains or may be a different sequence or from a different source, relative to other domains or portions of a polypeptide or its encoding nucleic acid. In certain embodiments, a heterologous nucleic acid molecule may exist in a native host cell genome, but may have an altered expression level or have a different sequence or both. In other embodiments, heterologous nucleic acid molecules may not be endogenous to a host cell or host genome but instead may have been introduced into a host cell by transformation (e.g., transfection, electroporation), wherein the added molecule may integrate into the host genome or can exist as extra-chromosomal genetic material either transiently (e.g., mRNA) or semi-stably for more than one generation (e.g., episomal viral vector, plasmid or other self-replicating vector). In some embodiments, a domain is heterologous relative to another domain, if the first domain is not naturally comprised in the same polypeptide as the other domain (e.g., a fusion between two domains of different proteins from the same organism).

[0380] Long Terminal Repeat: The term “long terminal repeat” (LTR), as used herein, refers to a nucleic acid sequence, which in a wild-type context are found in pairs (which may be identical or have sequence similarity) that flank a retrovirus or an LTR retrotransposon. The term “LTR” also encompasses variants and fragments of a wild-type LTR which are functional for integration of a region of the nucleic acid molecule comprising the LTR into a target DNA molecule in the presence of factors from the retrovirus or LTR retrotransposon. An LTR is typically located at or near one end (e.g., the 5′ end or the 3′ end) of a template DNA or RNA, e.g., as described herein. In some instances, an LTR participates in integration of a heterologous object sequence comprised in the template DNA or RNA into a target DNA molecule (e.g., a genomic DNA). In some instances, the LTR, or a fragment thereof, is integrated into the target DNA molecule. In some instances, the LTR is not integrated into the target DNA molecule. In some instances, a first LTR of a template DNA or RNA (e.g., as described herein) has at least 50%, 60%, 70%, 75%, 80%, 85%, 90%, 95%, 96%, 97%, 98%, 99%, or 100% sequence identity to a second LTR sequence of the template DNA or RNA. In some instances, an LTR of a system or composition described herein has at least 75%, 80%, 85%, 90%, 95%, 96%, 97%, 98%, or 99% sequence identity to an LTR sequence of a naturally occurring retrovirus (e.g., endogenous retrovirus) or LTR retrotransposon. In some instances, an LTR of a system or composition described herein has at least one modification (e.g., an addition, substitution, or deletion) relative to an LTR sequence of a naturally occurring retrovirus (e.g., endogenous retrovirus) or LTR retrotransposon. In some embodiments, an LTR has promoter and/or enhancer activity.

[0381] Mutation or Mutated: The term “mutated” when applied to nucleic acid sequences means that nucleotides in a nucleic acid sequence may be inserted, deleted or changed compared to a reference (e.g., native) nucleic acid sequence. A single alteration may be made at a locus (a point mutation) or multiple nucleotides may be inserted, deleted or changed at a single locus. In addition, one or more alterations may be made at any number of loci within a nucleic acid sequence. A nucleic acid sequence may be mutated by any method known in the art. In some embodiments a mutation occurs naturally. In some embodiments a desired mutation can be produced by any suitable method.

[0382] Nucleic acid molecule: Nucleic acid molecule refers to both RNA and DNA molecules including, without limitation, cDNA, genomic DNA and mRNA, and also includes synthetic nucleic acid molecules, such as those that are chemically synthesized or recombinantly produced, such as RNA templates, as described herein. The nucleic acid molecule can be double-stranded or single-stranded, circular or linear. If single-stranded, the nucleic acid molecule can be the sense strand or the antisense strand. Unless otherwise indicated, and as an example for all sequences described herein under the general format “SEQ. ID NO:,” “nucleic acid comprising SEQ. ID NO:1” refers to a nucleic acid, at least a portion which has either (i) the sequence of SEQ. ID NO:1, or (ii) a sequence complementary to SEQ. ID NO:1. The choice between the two is dictated by the context in which SEQ. ID NO:1 is used. For instance, if the nucleic acid is used as a probe, the choice between the two is dictated by the requirement that the probe be complementary to the desired target. Nucleic acid sequences of the present disclosure may be modified chemically or biochemically or may contain non-natural or derivatized nucleotide bases, as will be readily appreciated by those of skill in the art. Such modifications include, for example, labels, methylation, substitution of one or more naturally occurring nucleotides with an analog, inter-nucleotide modifications such as uncharged linkages (for example, methyl phosphonates, phosphotriesters, phosphoramidates, carbamates, etc.), charged linkages (for example, phosphorothioates, phosphorodithioates, etc.), pendant moieties, (for example, polypeptides), intercalators (for example, acridine, psoralen, etc.), chelators, alkylators, and modified linkages (for example, alpha anomeric nucleic acids, etc.). Also included are synthetic molecules that mimic polynucleotides in their ability to bind to a designated sequence via hydrogen bonding and other chemical interactions. Such molecules are known in the art and include, for example, those in which peptide linkages substitute for phosphate linkages in the backbone of a molecule. Other modifications can include, for example, analogs in which the ribose ring contains a bridging moiety or other structure such as modifications found in “locked” nucleic acids.

[0383] Gene expression unit: a gene expression unit is a nucleic acid sequence comprising at least one regulatory nucleic acid sequence operably linked to at least one effector sequence. A first nucleic acid sequence is operably linked with a second nucleic acid sequence when the first nucleic acid sequence is placed in a functional relationship with the second nucleic acid sequence. For instance, a promoter or enhancer is operably linked to a coding sequence if the promoter or enhancer affects the transcription or expression of the coding sequence. Operably linked DNA sequences may be contiguous or non-contiguous. Where necessary to join two protein-coding regions, operably linked sequences may be in the same reading frame.

[0384] Host: The terms host genome or host cell, as used herein, refer to a cell and/or its genome into which protein and/or genetic material has been introduced. It should be understood that such terms are intended to refer not only to the particular subject cell and/or genome, but to the progeny of such a cell and/or the genome of the progeny of such a cell. Because certain modifications may occur in succeeding generations due to either mutation or environmental influences, such progeny may not, in fact, be identical to the parent cell, but are still included within the scope of the term “host cell” as used herein. A host genome or host cell may be an isolated cell or cell line grown in culture, or genomic material isolated from such a cell or cell line, or may be a host cell or host genome which composing living tissue or an organism. In some instances, a host cell may be an animal cell or a plant cell, e.g., as described herein. In certain instances, a host cell may be a bovine cell, horse cell, pig cell, goat cell, sheep cell, chicken cell, or turkey cell. In certain instances, a host cell may be a corn cell, soy cell, wheat cell, or rice cell.

[0385] Introducing: As used herein, the term “introducing”, in the context of introducing an agent into a call, refers to causing the agent to be comprised by the cell. For example, the cell may be contacted with the agent in a way that allows the agent to pass through the cell membrane to enter the cell. Alternatively, the agent can be introduced into the cell by causing the cell to produce the agent. For instance, an agent that is a polypeptide can be introduced into the cell by contacting the cell with a nucleic acid encoding the polypeptide, under conditions that the nucleic acid enters the cell and is translated to produce the polypeptide.

[0386] Contacting: As used herein, the term “contacting”, in the context of contacting a cell with an agent, comprises placing the agent at a location that allows the agent to come into physical contact with the cell. Physical contact with the cell includes, e.g., binding to the cell surface or being internalized into the cell. In some embodiments, e.g., ex vivo, contacting a cell with an agent comprises introducing the agent into media, wherein the media is in contact with the cell. In some embodiments, e.g., in vivo, contacting a cell with an agent comprises administering the agent to a subject comprising the cell, under conditions that allow the agent to come into physical contact with the cell.

[0387] Object sequence: As used herein, the term object sequence refers to a nucleic acid segment that can be desirably inserted into a target nucleic acid molecule, e.g., by a recombinase polypeptide, e.g., as described herein. In some embodiments, a template RNA or template DNA comprises a DNA recognition sequence and an object sequence that is heterologous to the DNA recognition sequence and/or the remainder of the template RNA or template DNA, generally referred to herein as a “heterologous object sequence.” An object sequence may, in some instances, be heterologous relative to the nucleic acid molecule into which it is inserted (e.g., a target DNA molecule, e.g., as described herein). In some instances, an object sequence comprises a nucleic acid sequence encoding a gene (e.g., a eukaryotic gene, e.g., a mammalian gene, e.g., a human gene) or other cargo of interest (e.g., a sequence encoding a functional RNA, e.g., an siRNA or miRNA), e.g., as described herein. In certain instances, the gene encodes a polypeptide (e.g., a blood factor or enzyme). In some instances, an object sequence comprises one or more of a nucleic acid sequence encoding a selectable marker (e.g., an auxotrophic marker or an antibiotic marker), and/or a nucleic acid control element (e.g., a promoter, enhancer, silencer, or insulator).

[0388] Pseudoknot: A “pseudoknot sequence” sequence, as used herein, refers to a nucleic acid (e.g., RNA) having a sequence with suitable self-complementarity to form a pseudoknot structure, e.g., having: a first segment, a second segment between the first segment and a third segment, wherein the third segment is complementary to the first segment, and a fourth segment, wherein the fourth segment is complementary to the second segment. The pseudoknot may optionally have additional secondary structure, e.g., a stem loop disposed in the second segment, a stem-loop disposed between the second segment and third segment, sequence before the first segment, or sequence after the fourth segment. The pseudoknot may have additional sequence between the first and second segments, between the second and third segments, or between the third and fourth segments. In some embodiments, the segments are arranged, from 5′ to 3′: first, second, third, and fourth. In some embodiments, the first and third segments comprise five base pairs of perfect complementarity. In some embodiments, the second and fourth segments comprise 10 base pairs, optionally with one or more (e.g., two) bulges. In some embodiments, the second segment comprises one or more unpaired nucleotides, e.g., forming a loop. In some embodiments, the third segment comprises one or more unpaired nucleotides, e.g., forming a loop.

[0389] Stem-loop sequence: As used herein, a “stem-loop sequence” refers to a nucleic acid sequence (e.g., RNA sequence) with sufficient self-complementarity to form a stem-loop, e.g., having a stem comprising at least two (e.g., 3, 4, 5, 6, 7, 8, 9, or 10) base pairs, and a loop with at least three (e.g., four) base pairs. The stem may comprise mismatches or bulges.

[0390] Structural polypeptide domain: As used herein, the term “structural polypeptide domain” refers to a polypeptide domain that can form part of a proteinaceous exterior (e.g., a viral capsid) encapsulating a viral nucleic acid (e.g., a template RNA, e.g., as described herein). Retroviral env is not a structural polypeptide domain, as the term is used herein. In some instances, a structural polypeptide domain is encoded by a viral gene (e.g., a retroviral gag gene). In some instances, a structural polypeptide domain comprises a capsid protein (e.g., a CA protein and/or an NC protein, e.g., encoded by a retroviral gag gene), or a functional fragment thereof. In some instances, a structural polypeptide domain comprises a matrix protein (e.g., a MA protein, e.g., encoded by a retroviral gag gene), or a functional fragment thereof. In some instances, a structural polypeptide domain comprises a domain encoded by a retroviral gag (e.g., an endogenous retroviral gag). In some embodiments, a structural polypeptide domain comprises one or more mutations (e.g., point mutations, additions, substitutions, or deletions) relative to the amino acid sequence of a corresponding wild-type protein (e.g., a wild-type retroviral gag, CA, NC, or MA protein). In some embodiments, a structural polypeptide domain is part of a polyprotein or a fusion protein. In some embodiments, a structural polypeptide domain is not part of a polyprotein or a fusion protein.

[0391] Reverse transcriptase domain: As used herein, the term “reverse transcriptase domain” refers to a polypeptide domain capable of producing complementary DNA from a template RNA (e.g., as described herein). In some instances, a reverse transcriptase domain comprises a viral (e.g., retroviral, e.g., endogenous retroviral) reverse transcriptase, or a functional fragment thereof. In some instances, a reverse transcriptase domain produces complementary DNA from a template RNA via a primer (e.g., a tRNA primer, e.g., a lysyl tRNA primer). In some instances, a reverse transcriptase domain produces a double stranded template DNA (e.g., as described herein) from the template RNA. In some instances, a reverse transcriptase domain is encoded by a viral (e.g., retroviral, e.g., endogenous retroviral) pol gene. In some instances, a reverse transcriptase domain is encoded by a pol gene that also encodes a viral (e.g., retroviral, e.g., endogenous retroviral) integrase (IN). In some instances, a reverse transcriptase domain is encoded by a pol gene that also encodes a viral (e.g., retroviral, e.g., endogenous retroviral) protease (PR) and/or dTUPase (DU). In some embodiments, a reverse transcriptase polypeptide domain comprises one or more mutations (e.g., point mutations, additions, substitutions, or deletions) relative to the amino acid sequence of a corresponding wild-type protein (e.g., a wild-type retroviral pol, IN, PR, or DU protein). In some embodiments, a reverse transcriptase domain is part of a polyprotein or a fusion protein. In some embodiments, a reverse transcriptase domain is not part of a polyprotein or a fusion protein. In some embodiments, the reverse transcriptase domain comprises RNaseH activity. In some embodiments, a functional reverse transcriptase comprises a single protein subunit, e.g., is monomeric. In some embodiments, a functional reverse transcriptase comprises at least two subunits, e.g., is dimeric. In some embodiments, the reverse transcriptase domain is less active (or inactive) in monomeric form compared to in dimeric form. In some embodiments, a dimeric reverse transcriptase comprises two identical subunits. In some embodiments, a dimeric reverse transcriptase comprises different subunits, e.g., a p51 and a p66 subunit. In some embodiments, a reverse transcriptase comprises at least three subunits, e.g., two p51 subunits and at least one p15 subunit. In some embodiments, a reverse transcriptase comprises an RNase H domain. In some embodiments, a reverse transcriptase comprises an inactivated RNase H domain. In some embodiments, a reverse transcriptase does not comprise an RNase H domain.

[0392] LTR retrotransposon: As used herein, the term “LTR retrotransposon” in the context of a domain (e.g., LTR retrotransposon structural polypeptide domain or LTR retrotransposon reverse transcriptase polypeptide domain) refers to a polypeptide domain having sequence similarity to a corresponding domain from a wild-type LTR retrotransposon, and at least one biological function (e.g., capsid formation or reverse transcription) in common with the corresponding domain. A wild-type LTR retrotransposon does not comprise an env gene. In some embodiments, an LTR retrotransposon may comprise a retrovirus (eg an endogenous retrovirus) engineered to lacka functional env gene.

[0393] Retroviral: As used herein, the term “retroviral” in the context of a domain (e.g., retroviral structural polypeptide domain or retroviral reverse transcriptase polypeptide domain) refers to a polypeptide domain having sequence similarity to a corresponding domain from a wild-type retrovirus (e.g., endogenous retrovirus) and at least one biological function (e.g., capsid formation or reverse transcription) in common with the corresponding domain. A wild-type retrovirus comprises an env gene.

### BRIEF DESCRIPTION OF THE DRAWINGS

[0394] The patent or application file contains at least one drawing executed in color. Copies of this patent or patent application publication with color drawing(s) will be provided by the Office upon request and payment of the necessary fee.

[0395] FIG. 1 schematically shows an exemplary LTR or endogenous retrovirus (ERV) engineered for integrating a gene into a genome and delivered in the form of episomal DNA.

[0396] FIG. 2 schematically shows an exemplary LTR or ERV engineered for integrating a gene into a genome and delivered in the form of RNA.

[0397] FIG. 3 schematically shows an exemplary LTR or ERV engineered for introducing a gene episomally and delivered in the form of RNA.

[0398] FIG. 4 schematically shows an exemplary LTR or ERV engineered for integrating an intron-bearing gene into a genome and delivered in the form of RNA.

[0399] FIG. 5 schematically shows exemplary strategies for modifying an ERV or a retrovirus to be an LTR retrotransposon.

[0400] FIG. 6 schematically shows the design of an exemplary template.

[0401] FIGS. 7A and 7B describe luciferase activity assay for primary cells. LNPs formulated as according to Example 2 were analyzed for delivery of cargo to primary human (A) and mouse (B) hepatocytes, as according to Example 3. The luciferase assay revealed dose-responsive luciferase activity from cell lysates, indicating successful delivery of RNA to the cells and expression of Firefly luciferase from the mRNA cargo.

[0402] FIG. 8 shows LNP-mediated delivery of RNA cargo to the murine liver. Firefly lusciferase mRNA-containing LNPs were formulated and delivered to mice by iv, and liver samples were harvested and assayed for luciferase activity at 6, 24, and 48 hours post administration. Reporter activity by the various formulations followed the ranking LIPIDV005>LIPIDV004>LIPIDV003. RNA expression was transient and enzyme levels returned near vehicle background by 48 hours, post-administration.

[0403] FIGS. 9A-9D are a series of diagrams showing exemplary driver constructs and template constructs for plasmid delivery of LTR retrotransposons in trans.

[0404] FIG. 10 is a diagram showing integration efficiency measured in HEK293T cells transfected with the indicated driver construct and template construct, as determined by ddPCR.

[0405] FIGS. 11A-11B are a series of diagrams showing exemplary constructs for plasmid delivery of LTR retrotransposons in cis. (A) Comparison of a natural LTR retrotransposon (top panel) with an exemplary artificial cis configuration (bottom panel). (B) Three additional exemplary cis configurations, including one with a deletion of the reverse transcriptase/integrase (middle panel) and one with the PBS* modification (bottom panel).

[0406] FIG. 12 is a graph showing percentage of GFP+ cells after introduction of a template plasmid carrying a GFP payload and a driver plasmid utilizing an IAP retrotransposon or variants thereof (i.e., a variant with a mutated PBS, “PBS*”; and a variant in which pol was deleted, “IAP Pol Deletion”).

[0407] FIG. 13 is a graph showing integration efficiency after introduction of a template plasmid carrying a GFP payload and a driver plasmid utilizing the IAP retrotransposon or variants, as measured by ddPCR.

### DETAILED DESCRIPTION

[0408] This disclosure relates to compositions, systems and methods for targeting, editing, modifying or manipulating a DNA sequence (e.g., inserting a heterologous object DNA sequence into a target site of a mammalian genome) at one or more locations in a DNA sequence in a cell, tissue or subject, e.g., in vivo or in vitro. Generally, the systems and compositions include a template RNA comprising a pair of long terminal repeats (LTRs) flanking a heterologous object sequence (e.g., encoding a therapeutic effector). In some instances, the LTRs are derived from a retrovirus (e.g., an endogenous retrovirus). In some instances, the LTRs are derived from a retrotransposon (e.g., an LTR retrotransposon). The template RNA is typically introduced into a target cell with a structural polypeptide domain and a reverse transcriptase polypeptide domain, or nucleic acid molecules encoding the structural polypeptide domain and the reverse transcriptase polypeptide domain. In some instances, the structural polypeptide and/or reverse transcriptase polypeptide domain are derived from a retrovirus (e.g., an endogenous retrovirus). In some instances, the structural polypeptide and/or reverse transcriptase polypeptide domain are derived from a retrotransposon (e.g., an LTR retrotransposon). The template RNA and reverse transcriptase polypeptide domain can be enclosed within a proteinaceous exterior (e.g., a capsid) in the cell, e.g., to form a virus-like particle (VLP). Within the VLP, the reverse transcriptase polypeptide domain can generate a template DNA (e.g., a linear and/or double-stranded DNA) from the template RNA. The template DNA can then optionally be integrated into the genome of the cell, e.g., by an integrase from a retrovirus (e.g., an endogenous retrovirus) or a retrotransposon, e.g., an LTR retrotransposon. The heterologous object sequence may include, e.g., a coding sequence, a regulatory sequence, and/or a gene expression unit.

[0409] In some instances, the disclosure provides retrovirus- or retrotransposon-based systems for inserting a sequence of interest into the genome. Additional examples of retrotransposon elements are listed, e.g., in Tables 3A, 3B, 10, 11, X, and Y of PCT Application No. PCT/US2021/020943, and Tables 1 and 2 of PCT Application No. PCT/US2019/048607, each of which applications is incorporated herein by reference in its entirety.

### LTR Retrotransposon Systems

[0410] Long terminal repeat (LTR) retrotransposons are a type of mobile genetic elements that are widespread in eukaryotic genomes. Naturally-occurring LTR retrotransposons typically have a coding region flanked by direct (i.e., not inverted) long terminal repeats. The LTR typically includes a promoter whereby the coding region may be transcribed. The coding region typically codes for the Gag and Pol polyproteins. Gag is typically processed by protease to produce structural proteins matrix (MA), capsid (CA), and nucleocapsid (NC) proteins that form the virus-like particle (VLP), and inside of which reverse transcription of the LTR retrotransposon transcript takes place. Pol typically has protease, reverse transcriptase that copies the LTR retrotransposon transcript into cDNA, Rnase H, and integrase, which integrates the cDNA into the host genome. LTR retrotransposons also typically include a primer binding site (PBS) immediately downstream of the 5′LTR and a polypurine tract (PPT) immediately upstream of the 3′LTR.

[0411] FIG. 1 and FIG. 2 schematically depict systems for integrating a gene of interest in a genome. In both schema, a gene of interest is encoded in a template flanked with LTRs and other components (shown in more detail in FIG. 6). A driver encodes the remaining components of the ERV, retrovirus, or LTR retrotransposon, such as Gag and Pol. The driver and template may be introduced in DNA form (FIG. 1) or RNA form (FIG. 2). If introduced in DNA form, they are transcribed, the driver-derived transcripts are translated to produce the required proteins, which act on the template transcript to produce a cDNA of the template transcript and integrate it into the genome. If introduced in RNA form, the initial transcription step is skipped. A gene of interest may also be introduced with an intron (FIG. 4).

### LTR Retrotransposon and Retroviral-Based Genome Delivery Systems

[0412] The present disclosure provides compositions, systems, and methods for integrating a heterologous object sequence (e.g., encoding a therapeutic effector) into the genome of a target cell. Generally, a template RNA is introduced into a cell (e.g., as an RNA molecule, or in the form of a DNA molecule (e.g., an episome) that is transcribed into RNA in the cell). The template RNA is then enclosed in a proteinaceous exterior (e.g., capsid) within the cell, thereby forming a virus-like particle (VLP) in the cell. The template RNA is then reverse-transcribed in the VLP to generate a template DNA, e.g., thereby forming a pre-integration complex (PIC) comprising the template DNA enclosed in the proteinaceous exterior. In some embodiments, the VLP is initially formed in the cytoplasm. In some embodiments, the VLP is initially localized to the endoplasmic reticulum. The VLP does not obtain an envelope. In some embodiments, reverse transcription of the template RNA occurs while the VLP is in the cytoplasm. In some embodiments, reverse transcription of the template RNA occurs while the VLP is in the endoplasmic reticulum or another organeller compartment. In some embodiments, reverse transcription of the template RNA occurs while the VLP is in the nucleus.

[0413] Once in the nucleus, the template DNA (or a portion thereof, e.g., the heterologous object sequence) may be integrated into the genome of the cell, e.g., by an integrase (e.g., a retrotransposon integrase or a retroviral integrase, e.g., a lentiviral integrase, e.g., an HIV integrase). In some embodiments, the template DNA is not integrated into the genome of the cell. In certain embodiments, the non-integrated template DNA is circularized, e.g., to form an episome comprising the heterologous object sequence. In some embodiments, the integrated heterologous object sequence may be flanked by one or more LTRs (e.g., the first LTR and/or the second LTR). In some embodiments, the integrant comprises one or more target site duplications (e.g., having a length of about 4, 5, or 6 nucleotides each). In some embodiments, the integration site has one or more (e.g., 1, 2, 3, 4, 5, 6, 7, 8, 9, 10, 11, 12, 13, 14, 15, 16, or all 17) of the following characteristics:
[0414] (i) about 1 kb upstream of a gene transcribed by RNA pol III;
[0415] (ii) about 2-3 kb (e.g., about 2, 2.5, or 3 kb) upstream of a gene transcribed by RNA pol III;
[0416] (iii) comprises a silent mating locus;
[0417] (iv) positioned within 10, 20, 30, 40, 50, 60, 70, 80, 90, 100, 500, or 1000 bp of a telomere;
[0418] (v) within a promoter, e.g., a promoter for a gene transcribed by RNA pol II;
[0419] (vi) within heterochromatin;
[0420] (vii) within an enhancer;
[0421] (viii) within a transcriptional start site;
[0422] (ix) within a gene-rich region of a chromosome;
[0423] (x) within a chromosomal region proximal to the nuclear periphery;
[0424] (xi) within a nucleosome-free region;
[0425] (xii) within a site hypersensitive to DNAse I;
[0426] (xiii) located about 40-150 bp (e.g., about 40, 50, 51, 52, 53, 54, 60, 70, 80, 90, 100, 110, 120, 130, 140, or 150 bp of a tRNA coding region);
[0427] (xiv) within an exon;
[0428] (xv) within an intron;
[0429] (xvi) within a gene (e.g., having a parallel orientation to the gene or having an antiparallel orientation to the gene); and/or
[0430] (xvii) within a region into which one or more of the following retrotransposons and/or retroviruses is capable of integrating: Ty1, Ty3, Ty5, Tf1, Maggy, MLV, HIV, or PFV.

### Template RNA Component

[0431] In some embodiments, the template RNA comprises one or more (e.g., 1, 2, 3, 4, 5, or all 6) of the following (e.g., in order from 5′ to 3′): (i) a first long terminal repeat (LTR), (ii) a primer binding site (PBS), (iii) a promoter, (iv) a heterologous object sequence (e.g., comprising an open reading frame), (v) a polypurine tract, and/or (vi) a second LTR. In some embodiments, the PBS has a length of about 15, 16, 17, 18, 19, or 20 nucleotides (e.g., 18 nucleotides). In some embodiments, the PBS is complementary to a sequence comprised in a tRNA (e.g., a sequence located at the 3′ end of the tRNA) normally provided by the host cell in order to start the reverse transcription. In some embodiments, the polypurine tract (PPT) comprises at least 50%, 75%, 80%, 85%, 90%, 95%, 96%, 97%, 98%, 99%, or 100% A or G nucleotides. The PPT is responsible for starting the synthesis of the proviral (+) DNA strand. In some embodiments, the PPT has a length of about 7, 8, 9, 10, 11, 12, or 13 nucleotides (e.g., 10 nucleotides). In some embodiments, the packaging signal is capable of being specifically bound by a zinc finger protein or a nucleocapsid protein.

[0432] In some embodiments, the template RNA does not comprise a sequence encoding a functional viral protein (e.g., gag, pol, or a viral reverse transcriptase and/or integrase as described herein, or functional fragments thereof). In some embodiments, the template RNA comprises an in-frame deletion of a viral gene, e.g., a gene encoding a functional viral protein (e.g., gag, pol, or a viral reverse transcriptase and/or integrase as described herein, or functional fragments thereof). In some embodiments, the template RNA is introduced into a cell with (e.g., prior to, concurrently with, or after) a driver construct as described herein (e.g., a driver construct comprising one or more genes encoding functional viral proteins, e.g., gag, pol, or a viral reverse transcriptase and/or integrase as described herein, or functional fragments thereof). In some embodiments, a driver construct has a structure as shown in any of FIGS. 9-13. In some embodiments, a template RNA has a structure as shown in any of FIGS. 9-13. In some embodiments, the heterologous object sequence is between the first LTR and the second LTR, and one or more sequences encoding functional viral proteins (e.g., gag, pol, or a viral reverse transcriptase and/or integrase as described herein, or functional fragments thereof) is between the first LTR and second LTR (e.g., between the first LTR and the heterologous object sequence).

[0433] In some embodiments, the template RNA comprises one or more sequences encoding a functional viral protein (e.g., gag, pol, or a viral reverse transcriptase and/or integrase as described herein, or functional fragments thereof). In some embodiments, the template RNA comprises a sequence encoding a functional viral gag protein, or a functional fragment thereof. In some embodiments, template RNA comprises a sequence encoding a functional viral pol protein, or a functional fragment thereof. In some embodiments, template RNA comprises a sequence encoding a functional viral reverse transcriptase protein, or a functional fragment thereof. In some embodiments, template RNA comprises a sequence encoding a functional viral integrase protein, or a functional fragment thereof. In certain embodiments, the template RNA comprises a sequence encoding a functional viral gag protein, a functional viral pol protein, and a functional viral reverse transcriptase and/or integrase protein, e.g., as described herein, or functional fragments thereof. In certain embodiments, the sequences encoding functional viral proteins, or functional fragments thereof, are positioned between the primer binding site and the heterologous object sequence. In some embodiments, a template RNA has a structure as shown in any of FIGS. 9-13.

[0434] In some embodiments, the first LTR is located at, or within 1, 2, 3, 4, 5, 6, 7, 8, 9, 10, 15, 20, 25, 30, 40, 50, 60, 70, 80, 90, or 100 nucleotides of the 5′ end of the template RNA. In some embodiments, the second LTR is located at, or within 1, 2, 3, 4, 5, 6, 7, 8, 9, 10, 15, 20, 25, 30, 40, 50, 60, 70, 80, 90, or 100 nucleotides of the 3′ end of the template RNA. In some embodiments, one or more of the LTRs has a length of about 100-200, 200-300, 300-400, 400-500, 500-600, 600-700, 700-800, 800-900, 900-1000, 1000-1500, or 1500-2000 nucleotides. In some embodiments, one or more of the LTRs comprises a U3 region (e.g., comprising a promoter). In embodiments, the U3 region is about 200-300, 300-400, 400-500, 500-600, 600-700, 700-800, 800-900, 900-1000, 1000-1100, or 1100-1200 nucleotides. In some embodiments, one or more of the LTRs comprises a repeated region (R). In some embodiments, one or more of the LTRs comprises a U5 region (e.g., having a length of about 75-100, 100-125, 125-150, 150-175, 175-200, 200-225, or 225-250 nucleotides). In some embodiments, one or more of the LTRs comprises a sequence that can be specifically bound by an integrase (e.g., a retroviral or retrotransposon integrase, e.g., as described herein). In embodiments, the sequence that can be specifically bound by an integrase has a length of about 8-10, 10-15, or 15-20 nucleotides. In some embodiments, one or more of the LTRs (e.g., a 5′ LTR) comprises a promoter (e.g., a promoter recognized by PolII). In some embodiments, the LTRs are known as terminal direct repeats or short inverted repeats. In some embodiments the 5′ LTR comprises a R and U5 region and the 3′ LTR comprises a U3 and R region. In some embodiments the 5′ LTR lacks a U3 region and the 3′ LTR lacks a U5 region. In some embodiments. In some embodiments the LTR is a self-inactivating (SIN) LTR that has a ΔU3 modification intended to remove promoter or enhancer activity.

[0435] The template RNA of the system typically comprises an object sequence for insertion into a target DNA. The object sequence may be coding or non-coding. In some embodiments, the heterologous object sequence (e.g., of a system as described herein) is about 1-50, 50-100, 100-200, 200-300, 300-400, 400-500, 500-600, 600-700, 700-800, 800-900, 900-1000, 1000-2000, 2000-3000, 3000-4000, 4000-5000, 5000-6000, 6000-7000, 7000-8000, 8000-9000, 9000-10000, or more, nucleotides in length.

[0436] In some embodiments, the object sequence may contain an open reading frame. In some embodiments, the template RNA has a Kozak sequence. In some embodiments, the template RNA has an internal ribosome entry site. In some embodiments, the template RNA has a self-cleaving peptide such as a T2A or P2A site. In some embodiments, the template RNA has a start codon. In some embodiments, the template RNA has a splice acceptor site. In some embodiments, splice donor and acceptor sites are removed. In some embodiments, the template RNA has a splice donor site. Exemplary splice acceptor and splice donor sites are described in WO2016044416, incorporated herein by reference in its entirety. Exemplary splice acceptor site sequences are known to those of skill in the art and include, by way of example only, CTGACCCTTCTCTCTCTCCCCCAGAG (SEQ ID NO: 4) (from human HBB gene) and TTTCTCTCCCACAAG (SEQ ID NO: 5) (from human immunoglobulin-gamma gene). In some embodiments the template RNA, has a microRNA binding site downstream of the stop codon. In some embodiments, the template RNA has a polyA tail downstream of the stop codon of an open reading frame. In some embodiments, the template RNA comprises one or more exons. In some embodiments, the template RNA comprises one or more introns. In some embodiments, the template RNA comprises a eukaryotic transcriptional terminator. In some embodiments, the template RNA comprises an enhanced translation element or a translation enhancing element. In some embodiments, the RNA comprises the human T-cell leukemia virus (HTLV-1) R region. In some embodiments, the RNA comprises a posttranscriptional regulatory element that enhances nuclear export, such as that of Hepatitis B Virus (HPRE) or Woodchuck Hepatitis Virus (WPRE). In some embodiments, in the template RNA, the heterologous object sequence encodes a polypeptide and is coded in an antisense direction with respect to the 5′ and 3′ UTR. In some embodiments, in the template RNA, the heterologous object sequence encodes a polypeptide and is coded in a sense direction with respect to the 5′ and 3′ UTR.

[0437] In some embodiments, the object sequence may contain a non-coding sequence. For example, the template RNA may comprise a promoter or enhancer sequence. In some embodiments, the template RNA comprises a tissue specific promoter or enhancer, each of which may be unidirectional or bidirectional. In some embodiments, the promoter is an RNA polymerase I promoter, RNA polymerase II promoter, or RNA polymerase III promoter. In some embodiments, the promoter comprises a TATA element. In some embodiments, the promoter comprises a B recognition element. In some embodiments, the promoter has one or more binding sites for transcription factors. In some embodiments, the non-coding sequence is transcribed in an antisense-direction with respect to the 5′ and 3′ UTR. In some embodiments, the non-coding sequence is transcribed in a sense direction with respect to the 5′ and 3′ UTR.

[0438] It is understood that, when a template RNA is described as comprising an open reading frame or the reverse complement thereof, in some embodiments the template RNA must be converted into double stranded DNA (e.g., through reverse transcription) before the open reading frame can be transcribed and translated.

[0439] In certain embodiments, customized RNA sequence template can be identified, designed, engineered and constructed to contain sequences altering or specifying host genome function, for example by introducing a heterologous coding region into a genome; affecting or causing exon structure/alternative splicing; causing disruption of an endogenous gene; causing transcriptional activation of an endogenous gene; causing epigenetic regulation of an endogenous DNA; causing up- or down-regulation of operably liked genes, etc. In certain embodiments, a customized RNA sequence template can be engineered to contain sequences coding for exons and/or transgenes, provide for binding sites to transcription factor activators, repressors, enhancers, etc., and combinations of thereof. In other embodiments, the coding sequence can be further customized with splice acceptor sites, poly-A tails.

[0440] In some embodiments, the template RNA further comprises one or more (e.g., 1, 2, 3, or all 4) of the following: a dimerization initiation signal, a packaging signal (Psi), a Rev-responsive element (RRE), and/or a post-transcriptional regulatory element. A Psi sequence is a Packaging signal that has a secondary RNA structure specifically recognized by either the Zn-fingers or the basic residues of the nucleocapsid domain of the GAG proteins. The PSI sequence is generally located just after the PBS (primer-binding site) but before the Gag AUG. For HIV- and SIV-like retroviruses, the important and selective components of the PSI are an RCC sequence within a 7-base loop, followed or preceded by a less specific GAYC loop with a GC-rich stem (Harrison et al., 1995; Clever et al., 2002). Accessory stem-loop formations ensure a high level of specificity in packaging. A dimerization initiation signal (DIS) triggers dimerization, which allows the recognition and the interaction of the two RNAs, even in the absence of proteins. The signal is formed by a symmetrical loop near the PSI (reviewed by Paillart et al., 2004). This noncovalent, symmetrical intermolecular interaction is called a ‘kissing-loop complex’ for retroviruses, and is further stabilized by a more extended duplex (Paillart et al., 2004, https://www.nature.com/articles/nrimicro90) In a way analogous to that for the PSI sequence, the dimerization mechanism may be specific. Thus, elements of the non-autonomous groups would either harbor the same DIS as their active partners (forming specific heterodimers), or their competitive packaging efficiency must allow them to be preferentially packaged and therefore strictly homodimeric.

[0441] FIG. 6 schematically shows the design of a template DNA or RNA. A template typically will contain, in 5′-to-3′ order, a 5′ UTR, a primer binding site, optionally a dimerization initiation signal, optionally a Psi packing signal and/or Rev-responsive element (RRE), a promoter for the gene of interest, the gene of interest, optionally a post-transcriptional regulatory element, a polypurine tract, and a 3′ LTR.

[0442] In certain embodiments, the dimerization initiation signal is positioned between the PBS and the promoter. In certain embodiments, the packaging signal (Psi) and/or the RRE are positioned between the dimerization initial signal and the promoter. In certain embodiments, the post-transcriptional regulatory element is positioned between the heterologous object sequence and the polypurine tract. In some embodiments, the template RNA does not comprise a PBS. In some embodiments, the template RNA does not comprise a dimerization initiation signal. In some embodiments, the template RNA does not comprise a packing signal (Psi). In some embodiments, the template RNA does not comprise an RRE. In some embodiments, the template RNA does not comprise a post-transcriptional regulatory element. In some embodiments, the template RNA does not comprise a sequence encoding a structural polypeptide domain (e.g., a gag protein or a functional fragment thereof). In some embodiments, the template RNA does not comprise a sequence encoding a reverse transcriptase polypeptide domain (e.g., a pol protein or a functional fragment thereof).

[0443] In some embodiments, the template RNA associates with a protein complex (e.g., comprising gag proteins and/or pol proteins, e.g., a gag-pol polyprotein), e.g., prior to enclosure within the proteinaceous exterior. In some embodiments, the proteinaceous exterior comprises gag proteins and/or pol proteins, e.g., gag-pol polyproteins. In some embodiments, association of the template RNA with the protein complex locally enriches the template RNA for enclosure within the proteinaceous exterior. In some embodiments, the proteinaceous exterior encloses a reverse transcriptase polypeptide domain (e.g., an LTR retrotransposon reverse transcriptase polypeptide domain or a retroviral (e.g., endogenous retroviral) reverse transcriptase polypeptide domain). In some embodiments, the enclosed reverse transcriptase polypeptide domain reverse transcribes the template RNA in the VLP to generate the template DNA. In some embodiments, the proteinaceous exterior encloses an integrase domain (e.g., an LTR retrotransposon integrase domain or a retroviral (e.g., endogenous retroviral) integrase domain). In some embodiments, the enclosed integrase domain integrates the template DNA into the genome of the cell.

[0444] In some embodiments, the template RNA comprises a non-canonical RNA. In some embodiments, the template RNA comprises one or more modified nucleobases. In some embodiments, the template RNA is circular. In some embodiments, the template RNA comprises a non-translated cap region. In some embodiments, the template RNA comprises a non-translated tail region (e.g., a poly-A tail).

[0445] In some embodiments, the template RNA comprises a ribozyme, e.g., as described in PCT Publication No. WO 2020/142725 (incorporated herein by reference in its entirety). In some embodiments, the ribozyme is capable of self-cleavage (e.g., cleaving the template RNA). In some embodiments, ribozyme self-cleavage results in production of discrete 5′ or 3′ ends. viral RNA genome and subsequent production of infectious RNA viruses. Exemplary ribozymes include, without limitation, the Hammerhead ribozyme (e.g., the Hammerhead ribozymes shown in FIG. 23), the Varkud satellite (VS) ribozyme, the hairpin ribozyme, the GIR branching ribozyme, the glmS ribozyme, the twister ribozyme, the twister sister ribozyme, the pistol ribozyme (e.g., Pistol and Pistol 2 shown in FIG. 24), the hatchet ribozyme, and the Hepatitis delta virus ribozyme. In some embodiments, the template RNA comprises non-viral 5′ and 3′ sequences that enable generation of discrete 5′ and 3′ ends substantially identical to those of a retrovirus or retrotransposon (e.g., as described herein). In some embodiments, the template comprises one or more targeting sites for an endonuclease enzyme (e.g., an RNase, e.g., RNase H), e.g., as described in PCT Publication No. WO 2020/142725, supra. In some embodiments, the template RNA comprises a restriction site that, when cleaved by a restriction enzyme, results in the generation of discrete ends. In embodiments, the template RNA comprises a Type IIS restriction site. Exemplary Type IIS restriction enzymes include, without limitation, Acul, Alwl, Bael, Bbsl, Bbvl, BccI, BceAI, Bcgl, BciVI, BcoDI, BfuAI, Bmrl, Bpml, BpuEI, Bsal, BsaXI, BseRI, Bsgl, BsmAI, BsmBi, Bs F, Bsml, BspCNI, BspMI, BspQI, BsrDI, Bsrl, BtgZI, BtsCI, Bstl, CaspCI, Earl, Ecil, Esp3I, Faul, Fokl, Hgal, Hphl, HpyAV, Mboll, Mlyl, Mmel, MnlL, NmeATTT, Plel, Sapl, and SfaNI.

[0446] In some embodiments, the template RNA comprises a sequence encoding an intron (e.g., within the heterologous object sequence). In some embodiments, the intron is integrated into the genome of the cell (e.g., as part of the heterologous object sequence).

[0447] In some embodiments, the template RNA comprises a microRNA sequence, a siRNA sequence, a guide RNA sequence, a piwi RNA sequence.

[0448] In some embodiments, the template RNA comprises a non-coding heterologous object sequence, e.g., a regulatory sequence. In some embodiments, integration of the heterologous object sequence thus alters the expression of an endogenous gene. In some embodiments, integration of the heterologous object sequence upregulates expression of an endogenous gene. In some embodiments, integration of the heterologous object sequence downregulated expression of an endogenous gene.

[0449] In some embodiments, the template RNA comprises a site that coordinates epigenetic modification. In some embodiments, the template RNA comprises an element that inhibits, e.g., prevents, epigenetic silencing. In some embodiments, the template RNA comprises a chromatin insulator. For example, the template RNA comprises a CTCF site or a site targeted for DNA methylation.

[0450] In order to promote higher level or more stable gene expression, the template RNA may include features that prevent or inhibit gene silencing. In some embodiments, these features prevent or inhibit DNA methylation. In some embodiments, these features promote DNA demethylation. In some embodiments, these features prevent or inhibit histone deacetylation. In some embodiments, these features prevent or inhibit histone methylation. In some embodiments, these features promote histone acetylation. In some embodiments, these features promote histone demethylation. In some embodiments, multiple features may be incorporated into the template RNA to promote one or more of these modifications. CpG dinculeotides are subject to methylation by host methyl transferases. In some embodiments, the template RNA is depleted of CpG dinucleotides, e.g., does not comprise CpG nucleotides or comprises a reduced number of CpG dinucleotides compared to a corresponding unaltered sequence. In some embodiments, the promoter driving transgene expression from integrated DNA is depleted of CpG dinucleotides.

[0451] In some embodiments, the template RNA comprises a gene expression unit composed of at least one regulatory region operably linked to an effector sequence. The effector sequence may be a sequence that is transcribed into RNA (e.g., a coding sequence or a non-coding sequence such as a sequence encoding a micro RNA).

[0452] In some embodiments, the object sequence of the template RNA is inserted into a target genome in an endogenous intron. In some embodiments, the object sequence of the template RNA is inserted into a target genome and thereby acts as a new exon. In some embodiments, the insertion of the object sequence into the target genome results in replacement of a natural exon or the skipping of a natural exon.

[0453] In some embodiments, the object sequence of the template RNA is inserted into the target genome in a genomic safe harbor site, such as AAVS1, CCR5, or ROSA26. In some embodiments, the object sequence of the template RNA is inserted into the albumin locus. In some embodiments, the object sequence of the template RNA is inserted into the TRAC locus. In some embodiments, the object sequence of the template RNA is added to the genome in an intergenic or intragenic region. In some embodiments, the object sequence of the template RNA is added to the genome 5′ or 3′ within 0.1 kb, 0.25 kb, 0.5 kb, 0.75, kb, 1 kb, 2 kb, 3 kb, 4 kb, 5 kb, 7.5 kb, 10 kb, 15 kb, 20 kb, 25 kb, 50, 75 kb, or 100 kb of an endogenous active gene. In some embodiments, the object sequence of the template RNA is added to the genome 5′ or 3′ within 0.1 kb, 0.25 kb, 0.5 kb, 0.75, kb, 1 kb, 2 kb, 3 kb, 4 kb, 5 kb, 7.5 kb, 10 kb, 15 kb, 20 kb, 25 kb, 50, 75 kb, or 100 kb of an endogenous promoter or enhancer. In some embodiments, the object sequence of the template RNA can be, e.g., 50-50,000 base pairs (e.g., between 50-40,000 bp, between 500-30,000 bp between 500-20,000 bp, between 100-15,000 bp, between 500-10,000 bp, between 50-10,000 bp, between 50-5,000 bp. In some embodiments, the heterologous object sequence is less than 1,000, 1,300, 1500, 2,000, 3,000, 4,000, 5,000, or 7,500 nucleotides in length.

[0454] In some embodiments the template RNA has a poly-A tail at the 3′ end. In some embodiments the template RNA does not have a poly-A tail at the 3′ end.

[0455] In some embodiments a system or method described herein comprises a single template RNA. In some embodiments a system or method described herein comprises a plurality of template RNAs. In some embodiments, when the system comprises a plurality of nucleic acids, one or more nucleic acid comprises a conjugating domain. In some embodiments, a conjugating domain enables association of nucleic acid molecules, e.g., by hybridization of complementary sequences.

[0456] In some embodiments, the template (e.g., template RNA) comprises certain structural features, e.g., determined in silico. In embodiments, the template RNA is predicted to have minimal energy structures between −280 and −480 kcal/mol (e.g., between −280 to −300, −300 to −350, −350 to −400, −400 to −450, or −450 to −480 kcal/mol), e.g., as measured by RNAstructure, e.g., as described in Turner and Mathews Nucleic Acids Res 38:D280-282 (2009) (incorporated herein by reference in its entirety).

[0457] In some embodiments, the template (e.g., template RNA) comprises certain structural features, e.g., determined in vitro. In embodiments, the template RNA is sequence optimized, e.g., to reduce secondary structure as determined in vitro, for example, by SHAPE-MaP (e.g., as described in Siegfried et al. Nat Methods 11:959-965 (2014); incorporated herein by reference in its entirety). In some embodiments, the template (e.g., template RNA) comprises certain structural features, e.g., determined in cells. In embodiments, the template RNA is sequence optimized, e.g., to reduce secondary structure as measured in cells, for example, by DMS-MaPseq (e.g., as described in Zubradt et al. Nat Methods 14:75-82 (2017); incorporated by reference herein in its entirety).

[0458] It is understood that in referring to nucleotide distances between elements in nucleotides, unless specified otherwise, distance refers to the number of nucleotides (of a single strand) or base pairs (in a double strand) that are between the elements but not part of the elements. As an example, if a first element occupies nucleotides 1-100, and a second element occupies nucleotides 102-200 of the same nucleic acid, the distance between the first element and the second element is 1 nucleotide.

### Polypeptide Components

[0459] Gag. Gag is processed by protease into matrix (MA), capsid (CA), and nucleocapsid (NC) proteins. MA is necessary for membrane targeting of gag polyprotein and for capsid assembly. Matrix interacts with viral membrane. CA forms the prominent hydrophobic core of the virion. (viral capsid). The best-conserved part of the gag polyprotein is the CA-like major homology region (MHR), which usually displays a central QG-X2-E-X5-F-X2-L-X2-H motif (SEQ ID NO: 6) implicated in the transposition. NC is involved in RNA packaging through recognition of a specific region of the viral genome called Ψ (PSI genome packaging). A second similarity within gag polyproteins is found in the C-terminus of the NC as a Cys-X2-Cys-X4-His-X4-Cys (CCHC) motif (SEQ ID NO: 7), which may be absent or found one, two, or three times duplicated depending on the viral species. CCHC arrays have been found to be critical for many steps in the viral life cycle, and several studies have shown they are involved in virion assembly, RNA packaging, reverse transcription, and integration processes. Each CCHC motif coordinates a zinc atom. Gag may lack Matrix in some cases, e.g. Ty3 (https://onlinelibrary.wiley.com/doi/abs/10.1128/9781555819217.ch42). Gag may lack NC in some cases, e.g., Ty1. Gag in LTR retrotransposons typically lacks functional sequence for myristoylation and plasma membrane targeting (Ribet al 2006). In the systems described herein, therefore, gag sequence can be taken from ERVs or retroviruses with myristoylation knocked out.

[0460] Pol. Pol translation can be mediated by several mechanisms. For examples, the retrotransposon may include an internal ribosome entry site (IRES) for Pol. The sequence between Gag and Pol ORFs may include a small repetitive motif (such as AAAAA) that induces slippage of the ribosome, which then allows the translation of the second ORF by frameshifting. Another possible means is the use of a specific and rare transfer RNA (tRNA), causing ribosomal stalling and slippage and allowing entry into the second ORF. Gag and Pol may also occue in a ORF along with gag. The component proteins of Pol may occur in various orders (e.g., TY1/Copia like: PR-INT-RT-RH; TY3/Gypsy like: PR-RT-RH-INT). They may also be frameshifted from each other, as in intracisternal A particle (IAP) elements.

[0461] Protease. Proteases (PR) play a key role in the maturation process during which several peptides involved in the life cycle of the retroelement are scissed by this enzyme. LTR retroelement PRs belong to clan AA of aspartic peptidases. They dimerize in their active form and may be encoded as a part of the pol polyprotein, alone or as a part of the gag polyprotein, or in frame with a dUTPase. It is well known that the structural PR homodomain is founded in a core ˜90-150 residues long wherein the catalytic DTG motif is the most prominent feature along with a glycine at the C-terminal end preceded by two hydrophobic residues. At the primary structure level the most conserved part (core) of all clan peptidases may be divided in six amino acidic patterns constituting a template we have called “DTG/ILG”. The “DTG/ILG” template is the primary structure phenotype of a structural supersecondary structure, called “Andreeva's” template (Andreeva 1991) that was previously used to describe pepsins and retropepsin. The “Andreeva's” template is constituted by the following structural elements: an N-terminal loop (A1), a loop containing the catalytic motif (B1), an α-helix (C1) usually not preserved in retropepsins, a β-hairpin loop (D1), a hairpin loop (A2), a wide loop (B2), an α-helix (C2) towards C-terminal, and a loop (D2), which in empirically characterized retropepsins is substituted by a strand or a helical turn (Wlodawer and Gustchina 2000; Dunn et al. 2002). These elements are responsible of keep both function and three-dimensional (3D) structure in characterized retropepsins and other characterized clan AA peptidases (Wlodawer and Gustchina 2000; Dunn et al. 2002). It has also recently suggested that the structure of the HIV-1 (see the figure below) and other clan AA PRs have a flexibility-assisted mechanism evolutionarily preserved to favor the reactive conformation of the enzyme (Piana, Carloni, and Rothlisberger 2002; Piana, Carloni, and Parrinello 2002; Perryman, Lin, and McCammon 2004).

[0462] Reverse transcriptase. The Reverse Transcriptase (RT) is an enzyme capable of catalyzing the synthesis of DNA from a single strain of RNA or DNA. The reverse-transcription process is common among a wide range of prokaryotic and eukaryotic mobile genetic elements, and requires a primer of 12-18 bases in length usually provided by the 3′end of a host tRNA. At the primary structure level, RTs codified by Ty3 Gypsy and Retroviridae elements expand approximately 350 residues of the pol polyprotein, including an alignable core of approximately 180 aa wherein seven conserved regions can be distinguished. At the three-dimensional (3D) structure level the RT codified by the HIV-1 retrovirus is an asymmetrical heterodimer composed of two subunits of 66 and 51 kDa, p66 and p51 respectively. P66 can be divided into five structural subdomains consisting in the RNaseH domain and four subdomains which, due to their similarity to a human right hand, are referred to as fingers, palm, thumb, and connection (Kohlstaedt et al. 1992). P51 is a p-66′ derivative after proteolytic processing and excision of the RNase H. Although several evidences indicate that RTs encoded by other vertebrate retroviruses also form a heterodimer, the RT may also be functionally active as a monomer

[0463] Ribonuclease H. Ribonuclease H (RNase H) is a hydrolytic enzyme widely distributed in both prokaryotes and eukaryotes (Johnson et al. 1986; Doolittle et al. 1989). In Ty3 Gypsy and Retroviridae and other LTR retroelements this enzyme is encoded as a part of the pol polyprotein and constitutes the C-terminal end of the Reverse Transcriptase (RT). RNase H is responsible for the hydrolysis of the original RNA template that is part of the RNA/DNA hybrid generated after the retrotranscription process in the viral life cycle. The three dimensional (3D) structure of the HIV-1 RNase H is characterized by four or five α-helices and five β-sheets that interact aligning in parallel to conform the active site (Davies et al. 1991). The activity of this enzyme normally requires the presence of divalent cations like Mg2+ or Mn2+ that bind to an active site constituted by a catalytic triad (Asp-443-Glu-478-Asp-498). These three residues have been proposed to be important in RNase H-mediated catalysis by HIV-1 RT (Mizarhi et al. 1990; Davies et al. 1991). Mutations in any of these resides inhibit the RNase H activity but have small effects on polymerase activity of the HIV-1 retrovirus (Schatz et al. 1989; Mizarhi et al. 1990; Davies et al. 1991; Destefano et al. 1994).

[0464] Integrase. Retroelement integrases (INTs) are zinc finger nucleic acid-processing enzymes that catalyze the insertion of reverse-transcribed retroviral DNA into the host genome (Chiu and Davies 2004; Nowotny 2009). These enzymes remove two bases from the end of the LTR and are responsible for the insertion of the linear double-stranded viral DNA copy into the host cell DNA. INT amino acid architecture includes three subdomains: (a) The N-terminal subdomain, which displays a conserved Zinc finger “HHCC” binding motif (Lodi et al. 1995); (b) The central subdomain, which contains a catalytic core characterized by the presence of a conserved D-D-E motif (Kan et al. 1991; Polard and Chandler 1995); and (c) The C-terminal subdomain, which is less preserved than the others. INT enzyme seems to be related to unspecific DNA-binding although several studies of chimeric integrases assign this function to the central core (Katzman and Sudol 1995; Shibagaki and Chow 1997), while other authors alternatively suggest that the C-terminal subdomain might interact with a sub-terminal region of the viral DNA (Jenkins et al. 1997; Heuer and Brown 1997; Esposito and Craigie 1998; Heuer and Brown 1998). The functional structure of LTR retroelement-like INTs is already under study although it seems to be, together with a proviral DNA molecule and other viral and host proteins, part of a pre-integration complex of which little is known. Several studies suggest that this enzyme could act as a multimer or at least as a dimer (for a review in this topic see Craigie 2001).

[0465] Chromodomain. LTR retrotransposons may include a Chromatin Organization Modifier Domain (chromodomain). The chromodomain is a protein domain of approximately 50 residues in length, originally identified as a motif common to the Drosophila chromatin proteins Polycomb (Pc) and the heterochromatin protein1 HP1. Chromodomains are involved in chromatin remodeling and regulation of the gene expression in eukaryotes (Koonin, Zhou and Lucchesi 1995; Cavalli and Paro 1998). Almost but not all elements belonging to a lineage ofMetaviridae Ty3 Gypsy LTR retrotransposons described in the genomes of plants, fungi, and vertebrates, are carriers of a chromodomain displayed at the C-terminal end of their integrases (Malik and Eickbush 1999).

[0466] dUTPase. dUTPases (DUTs) are cellular enzymes closely similar to Uracil-DNA glycosylases and that hydrolyze dUTP to dUMP and PPi, providing a substrate for thymidylate synthase (an enzyme that converts dUMP to TMP). The expression of cellular DUTs is regulated by the cell cycle; at high levels in dividing undifferentiated cells; and at low levels in terminally non-dividing differentiated cells (Miller et al. 2000). Certain retroviral lineages such as non-primate lentiviruses, betaretroviruses, and ERV-L elements encode and package DUTs into virus particles. However, depending on the genus, the dut gene is located in different zones of the internal region. While betaretroviruses codify for this enzyme in frame and N-terminal to the protease domain, lentiviruses and ERV-L elements present the ORF of this gene between or downstream to the RNaseH and INT domains (Elder et al. 1992; Turelli et al. 1997; Payne and Elder 2001 and references therein). In lentiviruses, DUT facilitates viral replication in non-dividing cells and prevents accumulation of G-to-A transitions in the viral genome, the role of DUT in betaretroviruses and ERV-L elements is still unclear. DUTPase domains have been also described in the genome of some Ty3 Gypsy LTR retrotransposons (Novikova and Blinov 2008) as well as in that of two plant paretroviruses belonging to Badnavirus genus [Dioscorea bacilliform virus (DBV) and Taro bacilliform virus (TaBV)].

[0467] In some embodiments, one or more of the gag, pol, gag-pol, reverse transcriptase polypeptide domain, and/or integrase domain are derived from an LTR retrotransposon, e.g., as described herein. In some embodiments, one or more of the gag, pol, gag-pol, reverse transcriptase polypeptide domain, and/or integrase domain are derived from a retrovirus (e.g., a an endogenous retrovirus), e.g., as described herein. In some embodiments, one or more of the gag, pol, gag-pol, reverse transcriptase polypeptide domain, and/or integrase domain are derived from an endogenous retrovirus, e.g., as described herein. In some embodiments, one or more of the gag, pol, gag-pol, reverse transcriptase polypeptide domain, and/or integrase domain are introduced into the cell as proteins. In some embodiments, one or more of the gag, pol, gag-pol, reverse transcriptase polypeptide domain, and/or integrase domain are introduced into the cell as RNA (e.g., mRNA that is translated to produce the proteins). In some embodiments, one or more of the gag, pol, gag-pol, reverse transcriptase polypeptide domain, and/or integrase domain are introduced into the cell as DNA (e.g., a plasmid or episome), e.g., wherein genes encoding the gag, pol, gag-pol, reverse transcriptase polypeptide domain, and/or integrase domain are transcribed from the DNA and the resultant mRNA subsequently translated to produce the protein. In some embodiments, one or more of the gag, pol, gag-pol, reverse transcriptase polypeptide domain, and/or integrase domain is introduced into the cell by electroporation. In some instances, one or more of the gag, pol, gag-pol, reverse transcriptase polypeptide domain, and/or integrase domain is introduced into the cell via a lipid nanoparticle (LNP).

[0468] In some embodiments, a nucleic acid molecule (e.g., a DNA or RNA) encoding one or more of the gag, pol, gag-pol, reverse transcriptase polypeptide domain, and/or integrase domain does not comprise a sequence encoding an Env protein (e.g., as described in Magiorkinis et al. 2012, PNAS 109(19) 7385-7390; incorporated herein by reference in its entirety). In some embodiments, the cell does not comprise an Env protein or any nucleic acid molecules encoding an Env protein. In some embodiments, the gag, pol, gag-pol, reverse transcriptase polypeptide domain, and/or integrase domain are derived from a retrovirus, which has been engineered to remove the Env protein and/or to remove a nucleic acid sequence encoding the Env protein (e.g., to produce an LTR retrotransposon). In some embodiments, the gag, pol, gag-pol, reverse transcriptase polypeptide domain, and/or integrase domain are derived from a retrovirus that has been rendered nontransferable, e.g., via 5-azacytidine. In some embodiments, the gag, pol, gag-pol, reverse transcriptase polypeptide domain, and/or integrase domain are derived from a retrovirus that has been engineered to delete a myristoylation signal in the gag protein (or a functional fragment thereof). In some embodiments, the gag, pol, gag-pol, reverse transcriptase polypeptide domain, and/or integrase domain are derived from a retrovirus that has been engineered to remove a signal sequence for plasma membrane targeting. In some embodiments, the gag, pol, gag-pol, reverse transcriptase polypeptide domain, and/or integrase domain are derived from a retrovirus that has been engineered to modify the localization signal in the gag protein (or a functional fragment thereof), e.g., such that the gag protein or functional fragment thereof remains in the cell and/or localizes to the endoplasmic reticulum (e.g., FIG. 5).

[0469] In some embodiments, the structural polypeptide domain comprises a gag polyprotein, or a functional fragment (e.g., domain) thereof (e.g., a P24, P17, or P7/P9 domain). In some embodiments, the structural polypeptide domain lacks a myristoylation sequence. In some embodiments, the structural polypeptide domain lacks a plasma membrane targeting sequence. In some embodiments, the structural polypeptide domain comprises a matrix (MA) protein (e.g., a P17 protein). In some embodiments, the structural polypeptide domain comprises a capsid (CA) protein (e.g., a P24 protein). In some embodiments, the structural polypeptide domain comprises a nucleocapsid (NC) protein (e.g., a P7/P9 protein). In some embodiments, the structural polypeptide domain does not comprise a matrix protein. In some embodiments, the structural polypeptide domain does not comprise a nucleocapsid protein.

[0470] In some embodiments, the reverse transcriptase polypeptide domain comprises a pol polyprotein, or a functional fragment (e.g., domain) thereof (e.g., an RT, IN, PR, or DU domain). In some embodiments, the reverse transcriptase polypeptide domain comprises a retroviral or retrotransposon reverse transcriptase (RT). In some embodiments, the reverse transcriptase polypeptide domain comprises a retroviral or retrotransposon protease (PR). In some embodiments, the reverse transcriptase polypeptide domain comprises a retroviral or retrotransposon integrase (IN). In some embodiments, the reverse transcriptase polypeptide domain comprises a retroviral or retrotransposon dUTPase (DU). In some embodiments, the reverse transcriptase polypeptide domain comprises a RNase H. In some embodiments, the reverse transcriptase polypeptide domain comprises a chromodomain. In some embodiments, the reverse transcriptase polypeptide domain does not comprise a chromodomain.

[0471] In some embodiments, the structural polypeptide domain and the reverse transcriptase polypeptide domain are part of the same polypeptide (e.g., a gag-pol). In some embodiments, the structural polypeptide domain and the reverse transcriptase polypeptide domain are different polypeptides. In some embodiments, the structural polypeptide domain and the reverse transcriptase polypeptide domain are encoded by the same nucleic acid molecule (e.g., comprising an internal ribosome entry site (IRES) between the sequences encoding the structural polypeptide domain and the reverse transcriptase polypeptide domain).

[0472] In some embodiments, a system or composition as described herein comprises elements (e.g., polypeptides or nucleic acid molecules) derived from a retrotransposon (e.g., an LTR retrotransposon). Non-limiting examples of retrotransposons that may be used as described herein include MusD, Gypsy/Ty3 (clades CRM, Del, Galadriel, Reina, REM1, G-Rhodo, Pyggy, MGLR3, Pyret, Maggy, MarY1, Tse3, TF1-2, Ty3, V-clade, Skipper, Athila, Tat, 17.6, Gypsy, 412/mdg1, Micropia/mdg3, A-clade, B-clade, C-clade, Gmr1, Osvaldo, Cer2-3, Cer1, CsRN1, Tor1, Tor4, Tor2, and Cigr-1), Copia/Ty1 (clades Ty (Pseudovirus), CoDi-I or CoDi-A, CoDi-II or CoDi-B, CoDi-C, CoDi-D, GalEA, p-Cretro, Sire, Oryco, Retrofit, Tork, Osser, PyREIG1, Hydra, Copia, 1731, Tricopia, Mtanga, and Humnum), Copia/Ty1 (clades Ty (Pseudovirus), CoDi-I or CoDi-A, CoDi-II or CoDi-B, CoDi-C, CoDi-D, GalEA, p-Cretro, Sire, Oryco, Retrofit, Tork, Osser, PyREIG1, Hydra, Copia, 1731, Tricopia, Mtanga, and Humnum), Bel/Pao, Morgane, BARE2, Large Retrotransposon Derivative (LARD), Terminal-repeat Retrotransposon in Miniature (TRIM), IAP, and ETn. In some embodiments, a system or composition as described herein comprises elements of an LTR retrotransposon derived from a rodent (e.g., a rodent of family Muridae, e.g., a mouse).

[0473] In some embodiments, a system or composition as described herein comprises elements (e.g., polypeptides or nucleic acid molecules) derived from a MusD retrotransposon (e.g., a U3, R, U5, 5′ LTR, 3′ LTR, PBS, gag, pro, pol, 5′ flank, 3′ flank, PBS*, or PPT element of a MusD retrotransposon, e.g., as described herein, e.g., in Table S2). In certain embodiments, a system or composition as described herein comprises elements derived from a MusD retrotransposon as described in Ribet et al. (2004, Genome Res. 14: 2261-2267; incorporated herein by reference in its entirety). In certain embodiments, a system or composition as described herein comprises elements (e.g., polypeptides or nucleic acid molecules) derived from a MusD1 retrotransposon (e.g., a sequence as listed in Table S2 or S5, or a sequence having at least 75%, 80%, 85%, 90%, 95%, 96%, 97%, 98%, or 99% sequence identity thereto). In certain embodiments, a system or composition as described herein comprises elements (e.g., polypeptides or nucleic acid molecules) derived from a MusD2 retrotransposon (e.g., a sequence as listed in Table S2 or S5, or a sequence having at least 75%, 80%, 85%, 90%, 95%, 96%, 97%, 98%, or 99% sequence identity thereto). In certain embodiments, a system or composition as described herein comprises elements (e.g., polypeptides or nucleic acid molecules) derived from a MusD3 retrotransposon (e.g., a sequence as listed in Table S2 or S5, or a sequence having at least 75%, 80%, 85%, 90%, 95%, 96%, 97%, 98%, or 99% sequence identity thereto). In certain embodiments, a system or composition as described herein comprises elements (e.g., polypeptides or nucleic acid molecules) derived from a MusD4 retrotransposon (e.g., a sequence as listed in Table S2 or S5, or a sequence having at least 75%, 80%, 85%, 90%, 95%, 96%, 97%, 98%, or 99% sequence identity thereto). In certain embodiments, a system or composition as described herein comprises elements (e.g., polypeptides or nucleic acid molecules) derived from a MusD5 retrotransposon (e.g., a sequence as listed in Table S2 or S5, or a sequence having at least 75%, 80%, 85%, 90%, 95%, 96%, 97%, 98%, or 99% sequence identity thereto). In certain embodiments, a system or composition as described herein comprises elements (e.g., polypeptides or nucleic acid molecules) derived from a MusD6 retrotransposon (e.g., a sequence as listed in Table S2 or S5, or a sequence having at least 75%, 80%, 85%, 90%, 95%, 96%, 97%, 98%, or 99% sequence identity thereto). In certain embodiments, a system or composition as described herein comprises elements (e.g., polypeptides or nucleic acid molecules) derived from a MusD7 retrotransposon (e.g., a sequence as listed in Table S2 or S5, or a sequence having at least 75%, 80%, 85%, 90%, 95%, 96%, 97%, 98%, or 99% sequence identity thereto). In certain embodiments, a system or composition as described herein comprises elements (e.g., polypeptides or nucleic acid molecules) derived from a MusD8 retrotransposon (e.g., a sequence as listed in Table S2 or S5, or a sequence having at least 75%, 80%, 85%, 90%, 95%, 96%, 97%, 98%, or 99% sequence identity thereto). In certain embodiments, a system or composition as described herein comprises elements (e.g., polypeptides or nucleic acid molecules) derived from a MusD9 retrotransposon (e.g., a sequence as listed in Table S2 or S5, or a sequence having at least 75%, 80%, 85%, 90%, 95%, 96%, 97%, 98%, or 99% sequence identity thereto).

[0474] In some embodiments, a system or composition as described herein comprises elements (e.g., polypeptides or nucleic acid molecules) derived from an ETnII retrotransposon (e.g., a U3, R, U5, 5′ LTR, 3′ LTR, PBS, 5′ flank, 3′ flank, or PPT element of a ETnII retrotransposon, e.g., as described herein, e.g., in Table S3). In certain embodiments, a system or composition as described herein comprises elements derived from an ETnII retrotransposon as described in Ribet et al. (2004, Genome Res. 14: 2261-2267; incorporated herein by reference in its entirety). In certain embodiments, a system or composition as described herein comprises elements (e.g., polypeptides or nucleic acid molecules) derived from an ETnII A1 retrotransposon (e.g., a sequence as listed in Table S3 or S5, or a sequence having at least 75%, 80%, 85%, 90%, 95%, 96%, 97%, 98%, or 99% sequence identity thereto). In certain embodiments, a system or composition as described herein comprises elements (e.g., polypeptides or nucleic acid molecules) derived from an ETnII B1 retrotransposon (e.g., a sequence as listed in Table S3 or S5, or a sequence having at least 75%, 80%, 85%, 90%, 95%, 96%, 97%, 98%, or 99% sequence identity thereto). In certain embodiments, a system or composition as described herein comprises elements (e.g., polypeptides or nucleic acid molecules) derived from an ETnII B2 retrotransposon (e.g., a sequence as listed in Table S3 or S5, or a sequence having at least 75%, 80%, 85%, 90%, 95%, 96%, 97%, 98%, or 99% sequence identity thereto). In certain embodiments, a system or composition as described herein comprises elements (e.g., polypeptides or nucleic acid molecules) derived from an ETnII B3 retrotransposon (e.g., a sequence as listed in Table S3 or S5, or a sequence having at least 75%, 80%, 85%, 90%, 95%, 96%, 97%, 98%, or 99% sequence identity thereto).

[0475] In some embodiments, a system or composition as described herein comprises elements (e.g., polypeptides or nucleic acid molecules) derived from an ETnI 1 retrotransposon (e.g., a sequence as listed in Table S3 or S5, or a sequence having at least 75%, 80%, 85%, 90%, 95%, 96%, 97%, 98%, or 99% sequence identity thereto). In certain embodiments, a system or composition as described herein comprises elements derived from an ETnI retrotransposon as described in Ribet et al. (2004, Genome Res. 14: 2261-2267; incorporated herein by reference in its entirety).

[0476] In some embodiments, a system or composition as described herein comprises elements (e.g., polypeptides or nucleic acid molecules) derived from an IAP retrotransposon (e.g., a U3, R, U5, 5′ LTR, 3′ LTR, PBS, PBS*, gag, pro, or pol element of an IAP retrotransposon, e.g., as described herein, e.g., in Table S4). In certain embodiments, a system or composition as described herein comprises elements derived from an IAP retrotransposon as described in Dewannieux et al. (2004, Nat. Genetics 36(5): 534-539; incorporated herein by reference in its entirety). In certain embodiments, a system or composition as described herein comprises elements (e.g., polypeptides or nucleic acid molecules) derived from an IAP-RP23 retrotransposon (e.g., a sequence as listed in Table S4 or S5, or a sequence having at least 75%, 80%, 85%, 90%, 95%, 96%, 97%, 98%, or 99% sequence identity thereto). In certain embodiments, a system or composition as described herein comprises elements (e.g., polypeptides or nucleic acid molecules) derived from an IAP-92L23 retrotransposon (e.g., a sequence as listed in Table S4 or S5, or a sequence having at least 75%, 80%, 85%, 90%, 95%, 96%, 97%, 98%, or 99% sequence identity thereto).

[0477] In some embodiments, the retrotransposon comprises a DIRS element. DIRS elements encode tyrosine recombinase (YR) to perform genome integration, which is the feature the most distinguishing feature from other LTR retrotransposons. YR-encoding retroelements can be classified in 3 groups: (a) DIRS-like: A sub-group of YR elements phylogenetically close to the DIRS1 retrotransposon from Dictyostelium; (b) Ngaro-like: A sub-group of YR elements phylogenetically close to DrNgaro1 from Danio rerio; and (c) PAT-like: A sub-group of YR elements phylogenetically close to PAT from Panagrellus. DIRS elements may have three long ORFs: ORF1 (putative gag-like), ORF2 (tyrosine recombinase or YR ORF) and ORF3 (reverse transcriptase/RNAaseH/N6 deoxy-adenosine methylase or RT/RH/DAM ORF). Portions of the ORFs may overlap. The uncorrupted YR ORFs of all the full-length DIRS-like, PAT-like and Ngaro-like retroelements encode proteins bearing highly conserved RHRY tetrads similar to those of tyrosine recombinases. Templates based on DIRS may have, e.g., terminal inverted repeats (ITRs) that may be non-identical, and/or an internal complementary region, with sequence that is complementary to portions of one or both ITRs. An internal complementary region may be a circular junction. In certain embodiments, systems using portions of DIRS elements do generate a target-site duplication. For example, the recombination of a circular DNA into the genome using a site-specific recombinase may not generate a target site duplication. Exemplary DIRS elements are identified in http://www.biomedcentral.com/1471-2164/12/621. A functional study of DIRS elements (doi: 10.1093/nar/gkaa160) reported that DIRS-1 produces a mixture of single-stranded, mostly linear extrachromosomal cDNA intermediates and that if this cDNA is isolated and transformed into D. discoideum cells, it can be used by DIRS-1 proteins to complete productive retrotransposition.

[0478] In some embodiments, a system or composition as described herein comprises elements (e.g., polypeptides or nucleic acid molecules) derived from a retrovirus (e.g., an endogenous retrovirus). Non-limiting examples of retroviruses that may be used as described herein include: lentivirus (e.g., an HIV, e.g. HIV-1 or HIV-2), metavirus, pseudovirus, belpaovirus, betaretrovirus, picornavirus (e.g., enterovirus, e.g., enterovirus 71, coxsackievirus A16, or poliovirus), hepatovirus (e.g., a hepatitis virus, e.g., hepatitis A virus), calcivirus (e.g., norovirus or vesivirus), alphavirus (e.g., Semliki Forest virus, Sindbis virus, and Venezuelan equine encephalitis virus), flavivirus (e.g., Kunjin virus, yellow fever virus, West Nile virus, dengue virus, Zika virus, encephalitis virus, or hepacivirus, e.g., hepatitis C virus), coronavirus (e.g., murine hepatitis virus, SARS-CoV, or SARS-CoV-2), hepevirus (e.g., hepatitis E virus), reovirus, birnavirus (e.g., avibirnavirus), arenavirus, and vesicular stomatitis virus.

[0479] In some embodiments, the system comprises an inhibitor of one or more retrovirus restriction factors, including APOBEC3, APOBEC3G (Esnault et al., Nature 433, 2005), APOBE3G, APOBEC3F, APOBEC3, AID (activation induced deaminase doi:10.1093/nar/gk1054), APOBEC3A (DOI 10.1016/j.cub.2006.01.031), APOBEC3B (doi:10.1093/nar/gkj416), APOBEC1 (doi:10.1093/nar/gkr124), Dnmt, Dnmt1, Dnmt1o, Dnmt3a, Dnmt3b, Dnmt31, Edg2, Fv1, Mst1r, Fv4, Fv5, Lsh, Nxf1, Ref1/lv1/Trim5, Rfv1/2/3, Rmcf1, Rmv1/2/3, Slc20a2, Xpr1, and ZAP) and/or comprises one or more retroviral accessory genes (e.g., vpr, vif), to promote replication.

### Integration-Deficient Systems

[0480] The retroviral or retrotransposon systems described herein may, in some instances, be integration-deficient. In some embodiments, the integrase of the retrovirus or retrotransposon is substantially unable to integrate the template DNA into a target DNA (e.g., a genomic DNA). In some embodiments, the retroviral or retrotransposon system is integration-deficient independent of host cell repair machinery. In some embodiments, the retroviral or retrotransposon system is integration-deficient independent of a transposase, recombinase, and/or nuclease of the host cell. In embodiments, the integrase of the retrovirus or retrotransposon has reduced integrase activity, e.g., to at least 50%, 40%, 30%, 20%, 10%, 5%, 2%, or 1% of that of a corresponding wild-type sequence, e.g., as measured in an assay as described in Moldt et al. 2008 (BMC Biotechnol. 8:60; incorporated herein by reference). In some embodiments, the integrase of the retrovirus or retrotransposon comprises a mutation that reduces integrase activity, e.g., to at least 50%, 40%, 30%, 20%, 10%, 5%, 2%, or 1% of a corresponding wild-type sequence (e.g., a class I mutation, e.g., a mutation in a catalytic triad residue, such as mutations corresponding to D64, D116, and E152 for HIV-1 integrase). In some embodiments, one or both of the U3 and U5 attachment (att) sites at either end of the element may be mutated or deleted to impair integrase binding. In some embodiments, the system comprises an inhibitor (e.g., a small molecule inhibitor) of the integrase of the retrovirus or retrotransposon. Examples of inhibitors include, for HIV-1, strand-transfer inhibitors raltegravir elvitegravir. In some embodiments, the template RNA and/or template DNA does not comprise a DNA recognition site bound by and/or recognized by the integrase of the retrovirus or retrotransposon. ERVs, retrovirus, and LTR transposons engineering to be episomal are shown schematically in FIG. 3.

### Episomes

[0481] In some embodiments, an LTR retrotransposon-based system or method described herein can produce an episome (e.g., an episome comprising a heterologous object sequence), a circular DNA molecule. In some embodiments, an episome produced by a system or method described herein comprises an LTR. In certain embodiments, an episome produced by a system or method described herein comprises a plurality of LTRs (e.g., two LTRs). In some embodiments, an episome (e.g., an episome comprising two LTRs) is formed by non-homologous end joining (NHEJ), e.g., ligating together the 5′ and 3′ ends of a linear DNA (e.g., a vector DNA as described herein). In some embodiments, an episome (e.g., an episome comprising one LTR) is produced by homologous recombination (e.g., between viral 5′ and 3′ LTRs, e.g., via strand-invasion or single-strand annealing). In some embodiments, an episome (e.g., an episome comprising on LTR) is produced by ligation of nicks, e.g., present in intermediate products of reverse transcription.

### Introduction of a CAR in T Cells

[0482] A LTR retrotransposon-based system described herein may be used to modify immune cells. In some embodiments, a system described herein may be used to modify T cells. In some embodiments, T-cells may include any subpopulation of T-cells, e.g., CD4+, CD8+, gamma-delta, naïve T cells, stem cell memory T cells, central memory T cells, or a mixture of subpopulations. In some embodiments, a system described herein may be used to deliver or modify a T-cell receptor (TCR) in a T cell. In some embodiments, a system described herein may be used to deliver at least one chimeric antigen receptor (CAR) to T-cells. In some embodiments, a system described herein may be used to deliver at least one CAR to natural killer (NK) cells. In some embodiments, a system described herein may be used to deliver at least one CAR to natural killer T (NKT) cells. In some embodiments, a system described herein may be used to deliver at least one CAR to a progenitor cell, e.g., a progenitor cell of T, NK, or NKT cells. In some embodiments, cells modified with at least one CAR (e.g., CAR-T cells, CAR-NK cells, CAR-NKT cells), or a combination of cells modified with at least one CAR (e.g., a mixture of CAR-NK/T cells) are used to treat a condition as identified in the targetable landscape of CAR therapies in MacKay, et al. Nat Biotechnol 38, 233-244 (2020), incorporated by reference herein in its entirety. In some embodiments, the immune cells comprise a CAR specific to a tumor or a pathogen antigen selected from a group consisting of AChR (fetal acetylcholine receptor), ADGRE2, AFP (alpha fetoprotein), BAFF-R, BCMA, CAIX (carbonic anhydrase IX), CCR1, CCR4, CEA (carcinoembryonic antigen), CD3, CD5, CD8, CD7, CD10, CD13, CD14, CD15, CD19, CD20, CD22, CD30, CD33, CLLI, CD34, CD38, CD41, CD44, CD49f, CD56, CD61, CD64, CD68, CD70,CD74, CD99,CD117, CD123, CD133, CD138, CD44v6, CD267, CD269, CDS, CLEC12A, CS1, EGP-2 (epithelial glycoprotein-2), EGP-40 (epithelial glycoprotein-40), EGFR(HER1), EGFR-VIII, EpCAM (epithelial cell adhesion molecule), EphA2, ERBB2 (HER2, human epidermal growth factor receptor 2), ERBB3, ERBB4, FBP (folate-binding protein), Flt3 receptor, folate receptor-a, GD2 (ganglioside G2), GD3 (ganglioside G3), GPC3 (glypican-3), GPI00, hTERT (human telomerase reverse transcriptase), ICAM-1, integrin B7, interleukin 6 receptor, IL13Ra2 (interleukin-13 receptor 30 subunit alpha-2), kappa-light chain, KDR (kinase insert domain receptor), LeY (Lewis Y), L1CAM (LI cell adhesion molecule), LILRB2 (leukocyte immunoglobulin like receptor B2), MARTI, MAGE-A1 (melanoma associated antigen A1), MAGE-A3, MSLN (mesothelin), MUC16 (mucin 16), MUCI (mucin I), KG2D ligands, NY-ESO-1 (cancer-testis antigen), PRI (proteinase 3), TRBCI, TRBC2, TFM-3, TACI, tyrosinase, survivin, hTERT, oncofetal antigen (h5T4), p53, PSCA (prostate stem cell antigen), PSMA (prostate-specific membrane antigen), hRORl, TAG-72 (tumor-associated glycoprotein 72), VEGF-R2 (vascular endothelial growth factor R2), WT-1 (Wilms tumor protein), and antigens of HIV (human immunodeficiency virus), hepatitis B, hepatitis C, CMV (cytomegalovirus), EBV (Epstein-Barr virus), HPV (human papilloma virus).

[0483] The LNP formulation C14-4, comprising cholesterol, phospholipid, lipid-anchored PEG, and the ionizable lipid C14-4 (FIG. 2C of Billingsley et al. Nano Lett 20(3):1578-1589 (2020)) can be used for delivery to T cells, such as ex vivo delivery.

[0484] Additional edits can be performed on T-cells in order to improve activity of the CAR-T cells against their cognate target. In some embodiments, a second LNP formulation of C14-4 as described comprises a Cas9/gRNA preformed RNP complex, wherein the gRNA targets the Pdcd1 exon 1 for PD-1 inactivation, which can enhance anti-tumor activity of CAR-T cells by disruption of this inhibitory checkpoint that can otherwise trigger suppression of the cells (see Rupp et al. Sci Rep 7:737 (2017)). The application of both nanoparticle formulation thus enables lymphoma targeting by providing the anti-CD19 cargo, while simultaneously boosting efficacy by knocking out the PD-1 checkpoint inhibitor. In some embodiments, cells may be treated with the nanoparticles simultaneously. In some embodiments, the cells may be treated with the nanoparticles in separate steps, e.g., first deliver the RNP for generating the PD-1 knockout, and subsequently treat cells with the nanoparticles carrying the anti-CD19 CAR. In some embodiments, the second component of the system that improves T cell efficacy may result in the knockout of PD-1, TCR, CTLA-4, HLA-I, HLA-II, CSi, CD52, B2M, MHC-I, MHC-II, CD3, FAS, PDC1, CISH, TRAC, or a combination thereof. In some embodiments, knockdown of PD-1, TCR, CTLA-4, HLA-I, HLA-II, CSi, CD52, B2M, MHC-I, MHC-II, CD3, FAS, PDC1, CISH, or TRAC may be preferred, e.g., using siRNA targeting PD-1. In some embodiments, siRNA targeting PD-1 may be achieved using self-delivering RNAi as described by Ligtenberg et al. Mol Ther 26(6):1482-1493 (2018) and in WO2010033247, incorporated herein by reference in its entirety, in which extensive chemical modifications of siRNAs, conferring the resulting hydrophobically modified siRNA molecules the ability to penetrate all cell types ex vivo and in vivo and achieve long-lasting specific target gene knockdown without any additional delivery formulations or techniques. In some embodiments, one or more components of the system may be delivered by other methods, e.g., electroporation. In some embodiments, additional regulators are knocked in to the cells for overexpression to control T cell- and NK cell-mediated immune responses and macrophage engulfment, e.g., PD-L1, HLA-G, CD47 (Han et al. PNAS 116(21):10441-10446 (2019)). Knock-in may be accomplished through application of an additional genome editing system as described herein with a template carrying an expression cassette for one or more such factors (3) with targeting to a safe harbor locus, e.g., AAVS1, e.g., using gRNA GGGGCCACTAGGGACAGGAT (SEQ ID NO: 1) to target the Gene Writer polypeptide to AAVS1.

[0485] In order to achieve delivery specifically to T-cells, targeted LNPs (tLNPs) may generated that carry a conjugated mAb against CD4. See, e.g., Ramishetti et al. ACS Nano 9(7):6706-6716 (2015). Alternatively, conjugating a mAb against CD3 can be used to target both CD4+ and CD8⁺ T-cells (Smith et al. Nat Nanotechnol 12(8):813-820 (2017)). In other embodiments, the nanoparticle used to deliver to T-cells in vivo is a constrained nanoparticle that lacks a targeting ligand, as taught by Lokugamage et al. Adv Mater 31(41):e1902251 (2019).

### Retrotransposon Discovery Tools

[0486] As the result of repeated mobilization over time, transposable elements in genomic DNA often exist as tandem or interspersed repeats (Jurka Curr Opin Struct Biol 8, 333-337 (1998)). Tools capable of recognizing such repeats can be used to identify new elements from genomic DNA and for populating databases, e.g., Repbase (Jurka et al Cytogenet Genome Res 110, 462-467 (2005)). One such tool for identifying repeats that may comprise transposable elements is RepeatFinder (Volfovsky et al Genome Biol 2 (2001)), which analyzes the repetitive structure of genomic sequences. Repeats can further be collected and analyzed using additional tools, e.g., Censor (Kohany et al BMC Bioinformatics 7, 474 (2006)). The Censor package takes genomic repeats and annotates them using various BLAST approaches against known transposable elements. An all-frames translation can be used to generate the ORF(s) for comparison.

[0487] Other exemplary methods for identification of transposable elements include RepeatModeler2, which automates the discovery and annotation of transposable elements in genome sequences (Flynn et al bioRxiv (2019)). In addition to accomplishing this via available packages like Censor, one can perform an all-frames translation of a given genome or sequence and annotate with a protein domain tool like InterProScan, which tags the domains of a given amino acid sequence using the InterPro database (Mitchell et al. Nucleic Acids Res 47, D351-360 (2019)), allowing the identification of potential proteins comprising domains associated with known transposable elements.

[0488] In some embodiments, the LTR_STRUC program (e.g., as described by McCarthy et al. 2003, Bioinformatics 19(3): 362-367; incorporated herein by reference in its entirety) can be used to identify LTR retrotransposons suitable for use in the systems, compositions, or methods described herein. In some embodiments, the LTR_FINDER program (e.g., as described by Xu et al. 2007, Nucleic Acids Res. 35(2): W265-W268; incorporated herein by reference in its entirety) can be used to identify LTR retrotransposons suitable for use in the systems, compositions, or methods described herein. In some embodiments, the LTRharvest program (e.g., as described by Ellinghaus et al. 2008, BMC Bioinformatics 9:18; incorporated herein by reference in its entirety) can be used to identify LTR retrotransposons suitable for use in the systems, compositions, or methods described herein. In embodiments, one or more of the following characteristics are used to identify suitable LTR retrotransposons: 1) Elements are generally young based on the nucleotide divergence between the two LTR regions of the retrotransposons; 2) Many LTR elements at different genomic locations share high overall sequence similarity, indicating that they may be the products of recent transposition events; and 3) Target site duplications (TSDs) have been found for most of the complete elements and solo-LTRs. In some instances, retrotransposon integrases create staggered cuts at the target sites, resulting in TSDs as they insert new elements. As such, detection of TSDs flanking genomic retroelement copies can provide evidence for retrotransposition. In certain embodiments, LTR retrotransposons that are active in trans are identified by the presence of copies in the genome that comprise LTRs flanking incomplete gag and pol coding sequences.

[0489] Retrotransposons can be further classified according to the reverse transcriptase domain using a tool such as RTclassl (Kapitonov et al Gene 448, 207-213 (2009)).

### Polypeptide Component of Gene Writer Gene Editor System

### RT Domain:

[0490] In certain aspects of the present invention, the reverse transcriptase domain of the Gene Writer system is based on a reverse transcriptase domain of an LTR retrotransposon. A wild-type reverse transcriptase domain of an LTR retrotransposon can be used in a Gene Writer system or can be modified (e.g., by insertion, deletion, or substitution of one or more residues) to alter the reverse transcriptase activity for target DNA sequences. In some embodiments the reverse transcriptase is altered from its natural sequence to have altered codon usage, e.g. improved for human cells. In some embodiments the reverse transcriptase domain is a heterologous reverse transcriptase from a different retrovirus, retron, diversity-generating retroelement, retroplasmid, Group II intron, LTR-retrotransposon, non-LTR retrotransposon, or other source, e.g., as exemplified in Table Z1 or as comprising a domain listed in Table Z2 of PCT Application No. PCT/US2021/020943. In certain embodiments, a Gene Writer system includes a polypeptide that comprises a reverse transcriptase domain comprised in Table 10, Table 11, Table X, Table 30, Table 31, or Table 3A or 3B of PCT Application No. PCT/US2021/020943. In embodiments, the amino acid sequence of the reverse transcriptase domain of a Gene Writer system is at least about 50%, at least about 60%, at least about 70%, at least about 80%, at least about 85%, at least about 90%, at least about 95%, at least about 96%, at least about 97%, at least about 98%, at least about 99% identical to the amino acid sequence of a reverse transcriptase domain of a retrotransposon whose DNA sequence is referenced in Table 10, Table 11, Table X, Table Z1, Table Z2, Table 30, Table 31, or Table 3A or 3B of PCT Application No. PCT/US2021/020943. Reverse transcription domains can be identified, for example, based upon homology to other known reverse transcription domains using routine tools as Basic Local Alignment Search Tool (BLAST). In some embodiments, reverse transcriptase domains are modified, for example by site-specific mutation. In some embodiments, the reverse transcriptase domain is engineered to bind a heterologous template RNA. In some embodiments, a polypeptide (e.g., RT domain) comprises an RNA-binding domain, e.g., that specifically binds to an RNA sequence. In some embodiments, a template RNA comprises an RNA sequence that is specifically bound by the RNA-binding domain.

[0491] In some embodiments, the RT domain forms a dimer (e.g., a heterodimer or homodimer). In some embodiments, the RT domain is monomeric. In some embodiments, an RT domain, e.g., a retroviral RT domain, naturally functions as a monomer or as a dimer (e.g., heterodimer or homodimer). In some embodiments, an RT domain naturally functions as a monomer, e.g., is derived from a virus wherein it functions as a monomer. Exemplary monomeric RT domains, their viral sources, and the RT signatures associated with them can be found in Table 30 of PCT Application No. PCT/US2021/020943 with descriptions of domain signatures in Table 32. In some embodiments, the RT domain of a system described herein comprises an amino acid sequence of Table 30 in PCT Application No. PCT/US2021/020943, or a functional fragment or variant thereof, or a sequence having at least 70%, 80%, 90%, 95%, or 99% identity thereto. In embodiments, the RT domain is selected from an RT domain from murine leukemia virus (MLV; sometimes referred to as MoMLV) (e.g., P03355), porcine endogenous retrovirus (PERV) (e.g., UniProt Q4VFZ2), mouse mammary tumor virus (MMTV) (e.g., UniProt P03365), Mason-Pfizer monkey virus (MPMV) (e.g., UniProt P07572), bovine leukemia virus (BLV) (e.g., UniProt P03361), human T-cell leukemia virus-1 (HTLV-1) (e.g., UniProt P03362), human foamy virus (HFV) (e.g., UniProt P14350), simian foamy virus (SFV) (e.g., UniProt P23074), or bovine foamy/syncytial virus (BFV/BSV) (e.g., UniProt 041894), or a functional fragment or variant thereof (e.g., an amino acid sequence having at least 70%, 80%, 90%, 95%, or 99% identity thereto). In some embodiments, an RT domain is dimeric in its natural functioning. Exemplary dimeric RT domains, their viral sources, and the RT signatures associated with them can be found in Table 31 of PCT Application No. PCT/US2021/020943 with descriptions of domain signatures in Table 32. In some embodiments, the RT domain of a system described herein comprises an amino acid sequence of Table 31 in PCT Application No. PCT/US2021/020943, or a functional fragment or variant thereof, or a sequence having at least 70%, 80%, 90%, 95%, or 99% identity thereto. In some embodiments, the RT domain is derived from a virus wherein it functions as a dimer. In embodiments, the RT domain is selected from an RT domain from avian sarcoma/leukemia virus (ASLV) (e.g., UniProt AOA142BKH1), Rous sarcoma virus (RSV) (e.g., UniProt P03354), avian myeloblastosis virus (AMV) (e.g., UniProt Q83133), human immunodeficiency virus type I (HIV-1) (e.g., UniProt P03369), human immunodeficiency virus type II (HIV-2) (e.g., UniProt P15833), simian immunodeficiency virus (SIV) (e.g., UniProt P05896), bovine immunodeficiency virus (BIV) (e.g., UniProt P19560), equine infectious anemia virus (EIAV) (e.g., UniProt P03371), or feline immunodeficiency virus (FIV) (e.g., UniProt P16088) (Herschhorn and Hizi Cell Mol Life Sci 67(16):2717-2747 (2010)), or a functional fragment or variant thereof (e.g., an amino acid sequence having at least 70%, 80%, 90%, 95%, or 99% identity thereto). Naturally heterodimeric RT domains may, in some embodiments, also be functional as homodimers. In some embodiments, dimeric RT domains are expressed as fusion proteins, e.g., as homodimeric fusion proteins or heterodimeric fusion proteins. In some embodiments, the RT function of the system is fulfilled by multiple RT domains (e.g., as described herein). In further embodiments, the multiple RT domains are fused or separate, e.g., may be on the same polypeptide or on different polypeptides.

[0492] In some embodiments, an RT domain is mutated to increase fidelity compared to an otherwise similar domain without the mutation. For instance, in some embodiments, a YADD (SEQ ID NO: 8) or YMDD (SEQ ID NO: 9) motif in an RT domain (e.g., in a reverse transcriptase) is replaced with YVDD (SEQ ID NO: 10). In embodiments, replacement of the YADD (SEQ ID NO: 8) or YMDD (SEQ ID NO: 9) or YVDD (SEQ ID NO: 10) results in higher fidelity in retroviral reverse transcriptase activity (e.g., as described in Jamburuthugoda and Eickbush J Mol Biol 2011; incorporated herein by reference in its entirety).

[0493] The diversity of reverse transcriptases (e.g., comprising RT domains) has been described in, but not limited to, those used by prokaryotes (Zimmerly et al. Microbiol Spectr 3(2):MDNA3-0058-2014 (2015); Lampson B. C. (2007) Prokaryotic Reverse Transcriptases. In: Polaina J., MacCabe A. P. (eds) Industrial Enzymes. Springer, Dordrecht), viruses (Herschhorn et al. Cell Mol Life Sci 67(16):2717-2747 (2010); Menendez-Arias et al. Virus Res 234:153-176 (2017)), and mobile elements (Eickbush et al. Virus Res 134(1-2):221-234 (2008); Craig et al. Mobile DNA II 3rd Ed. DOI:10.1128/9781555819217 (2015)), each of which is incorporated herein by reference.

[0494] In some embodiments, a Gene Writing polypeptide comprises the RT domain from a retroviral reverse transcriptase, e.g., a wild-type M-HLV RT, e.g., comprising the following sequence, or a sequence with at least 98% identity thereto:

(SEQ ID NO: 11)
TLNIEDEYRLHETSKEPDVSLGSTWLSDFPQAWAETGGMGLAVRQAPLII
PLKATSTPVSIKQYPMSQEARLGIKPHIQRLLDQGILVPCQSPWNTPLLP
VKKPGTNDYRPVQDLREVNKRVEDIHPTVPNPYNLLSGLPPSHQWYTVLD
LKDAFFCLRLHPTSQPLFAFEWRDPEMGISGQLTWTRLPQGFKNSPTLFD
EALHRDLADFRIQHPDLILLQYVDDLLLAATSELDCQQGTRALLQTLGNL
GYRASAKKAQICQKQVKYLGYLLKEGQRWLTEARKETVMGQPTPKTPRQL
REFLGTAGFCRLWIPGFAEMAAPLYPLTKTGTLFNWGPDQQKAYQEIKQA
LLTAPALGLPDLTKPFELFVDEKQGYAKGVLTQKLGPWRRPVAYLSKKLD
PVAAGWPPCLRMVAAIAVLTKDAGKLTMGQPLVILAPHAVEALVKQPPDR
WLSNARMTHYQALLLDTDRVQFGPVVALNPATLLPLPEEGLQHNCLDILA
EAHGTRPDLTDQPLPDADHTWYTDGSSLLQEGQRKAGAAVTTETEVIWAK
ALPAGTSAQRAELIALTQALKMAEGKKLNVYTDSRYAFATAHIHGEIYRR
RGLLTSEGKEIKNKDEILALLKALFLPKRLSIIHCPGHQKGHSAEARGNR
MADQAARKAAITETPDTSTLLI

[0495] In some embodiments, a Gene Writing polypeptide comprises the RT domain from a retroviral reverse transcriptase comprising the sequence of amino acids 659-1329 of NP_057933, e.g., as shown below:

(SEQ ID NO: 12)
TLNIEDEHRLHETSKEPDVSLGSTWLSDFPQAWAETGGMGLAVRQAPLII
PLKATSTPVSIKQYPMSQEARLGIKPHIQRLLDQGILVPCQSPWNTPLLP
VKKPGTNDYRPVQDLREVNKRVEDIHPTVPNPYNLLSGLPPSHQWYTVLD
LKDAFFCLRLHPTSQPLFAFEWRDPEMGISGQLTWTRLPQGFKNSPTLFD
EALHRDLADFRIQHPDLILLQYVDDLLLAATSELDCQQGTRALLQTLGNL
GYRASAKKAQICQKQVKYLGYLLKEGQRWLTEARKETVMGQPTPKTPRQL
REFLGTAGFCRLWIPGFAEMAAPLYPLTKTGTLFNWGPDQQKAYQEIKQA
LLTAPALGLPDLTKPFELFVDEKQGYAKGVLTQKLGPWRRPVAYLSKKLD
PVAAGWPPCLRMVAAIAVLTKDAGKLTMGQPLVILAPHAVEALVKQPPDR
WLSNARMTHYQALLLDTDRVQFGPVVALNPATLLPLPEEGLQHNCLDILA
EAHGTRPDLTDQPLPDADHTWYTDGSSLLQEGORKAGAAVTTETEVIWAK
ALPAGTSAQRAELIALTQALKMAEGKKLNVYTDSRYAFATAHIHGEIYRR
RGLLTSEGKEIKNKDEILALLKALFLPKRLSIIHCPGHQKGHSAEARGNR
MADQAARKAA

[0496] Core RT (bold), annotated per above
[0497] RNAseH (underlined), annotated per above

[0498] In embodiments, the Gene Writing polypeptide further comprises one additional amino acid at the N-terminus of the sequence of amino acids 659-1329 of NP_057933. In embodiments, the Gene Writing polypeptide further comprises one additional amino acid at the C-terminus of the sequence of amino acids 659-1329 of NP_057933. In embodiments, the Gene Writing polypeptide comprises an RNaseH1 domain (e.g., amino acids 1178-1318 of NP_057933).

[0499] In some embodiments, a retroviral reverse transcriptase domain, e.g., M-MLV RT, may comprise one or more mutations from a wild-type sequence that may improve features of the RT, e.g., thermostability, processivity, and/or template binding. In some embodiments, an M-MLV RT domain comprises, relative to the M-MLV (WT) sequence above, one or more mutations, e.g., selected from D200N, L603W, T330P, T306K, W313F, D524G, E562Q, D583N, P51L, S67R, E67K, T197A, H204R, E302K, F309N, L435G, N454K, H594Q, D653N, R110S, K103L, e.g., a combination of mutations, such as D200N, L603W, and T330P, optionally further including T306K and W313F. In some embodiments, an M-MLV RT used herein comprises the mutations D200N, L603W, T330P, T306K and W313F. In embodiments, the mutant M-MLV RT comprises the following amino acid sequence:

(SEQ ID NO: 13)
TLNIEDEYRLHETSKEPDVSLGSTWLSDFPQAWAETGGMGLAVRQAPLII
PLKATSTPVSIKQYPMSQEARLGIKPHIQRLLDQGILVPCQSPWNTPLLP
VKKPGTNDYRPVQDLREVNKRVEDIHPTVPNPYNLLSGLPPSHQWYTVLD
LKDAFFCLRLHPTSQPLFAFEWRDPEMGISGQLTWTRLPQGFKNSPTLFN
EALHRDLADFRIQHPDLILLQYVDDLLLAATSELDCQQGTRALLQTLGNL
GYRASAKKAQICQKQVKYLGYLLKEGQRWLTEARKETVMGQPTPKTPRQL
REFLGKAGFCRLFIPGFAEMAAPLYPLTKPGTLFNWGPDQQKAYQEIKQA
LLTAPALGLPDLTKPFELFVDEKQGYAKGVLTQKLGPWRRPVAYLSKKLD
PVAAGWPPCLRMVAAIAVLTKDAGKLTMGQPLVILAPHAVEALVKQPPDR
WLSNARMTHYQALLLDTDRVQFGPVVALNPATLLPLPEEGLQHNCLDILA
EAHGTRPDLTDQPLPDADHTWYTDGSSLLQEGQRKAGAAVTTETEVIWAK
ALPAGTSAQRAELIALTQALKMAEGKKLNVYTDSRYAFATAHIHGEIYRR
RGWLTSEGKEIKNKDEILALLKALFLPKRLSIIHCPGHQKGHSAEARGNR
MADQAARKAAITETPDTSTLLI

### Integrase Domain:

[0500] In certain aspects of the present invention, the integrase domain of the Gene Writer system is based on an integrase domain of an LTR retrotransposon. In some embodiments, a Gene Writer polypeptide described herein comprises an integrase domain, e.g., wherein the integrase domain may be part of the RT domain. In some embodiments, an RT domain (e.g., as described herein) comprises an integrase domain. In some embodiments, an RT domain (e.g., as described herein) lacks an integrase domain, or comprises an integrase domain that has been inactivated by mutation or deleted.

[0501] In some embodiments, the integrase domain (e.g., a retroviral integrase domain, e.g., a lentiviral integrase domain, e.g., an HIV integrase domain) comprises one or mutations relative to a wild-type equivalent of the integrase domain, wherein the mutated integrase domain has less than 10%, 9%, 8%, 7%, 6%, 5%, 4%, 3%, 2%, or 1% of the activity of the wild-type equivalent of the integrase domain. In certain embodiments, the integrase domain comprises a class I mutation (e.g., as described in Wanisch et al. 2009, Mol. Therap. 17(8): 1316-1332). In certain embodiments, the integrase domain comprises a mutation in a catalytic triad residue (e.g., mutations in 1, 2, or 3 catalytic triad residues). In certain embodiments, the integrase domain comprises a substitution at D64 (e.g., D64V), D116, and/or E152 of the amino acid sequence of an HIV-1 integrase protein. In certain embodiments, the integrase domain comprises a substitution at one or more of the following residues: H12, D64, D116, N120, Q148, F185, W235, R262, R263, K264, K266, and/or K273 of the amino acid sequence of an HIV-1 integrase protein. In certain embodiments, the integrase domain comprises one or more of the following substitutions of the amino acid sequence of an HIV-1 integrase protein: H12A, D64V, D64A, D64E, D116N, N120L, Q148A, F185A, W235E, R262A, R263A, K264H, K264R, K264E, K266R, and/or K273R. In an embodiment, the integrase domain comprises a D64V substitution. In some embodiments, the integrase domain comprises a class II mutation.

[0502] In some embodiments, the integrase domain of a Gene Writer system possesses the integration specificity of the native LTR retrotransposon system, e.g., catalyzes integration at the same profile of DNA target sequences. In some embodiments, the integrase domain is modified to have altered DNA target specificity. In some embodiments, the altered DNA target specificity is conferred by mutation or the use of a heterologous integrase domain with a different DNA target sequence preference. In some embodiments, the altered DNA target specificity is conferred by the addition or substitution of a heterologous DNA binding domain in the integrase domain, e.g., a heterologous DNA binding domain as described below.

### DNA Binding Domain:

[0503] In certain aspects, the system comprises a DNA-binding domain that is selected, designed, or constructed for binding to a desired host DNA target sequence. In certain embodiments, the DNA-binding domain is a heterologous DNA-binding protein. In some embodiments, the heterologous DNA-binding domain is fused to a domain of a polypeptide of the system, e.g., an integrase domain, to alter the activity of the polypeptide. In some embodiments, the heterologous DNA binding element is a zinc-finger element or a TAL effector element, e.g., a zinc-finger or TAL polypeptide or functional fragment thereof. In some embodiments, the heterologous DNA binding element is a sequence-guided DNA binding element, such as Cas9, Cpf1, or other CRISPR-related protein that has been altered to have no endonuclease activity. In some embodiments the heterologous DNA binding element retains endonuclease activity. In some embodiments, the heterologous DNA-binding domain can be any one or more of Cas9 (e.g., Cas9, Cas9 nickase, dCas9), TAL domain, zinc finger (ZF) domain, Myb domain, combinations thereof, or multiples thereof.

[0504] In some embodiments, the DNA binding domain comprises a meganuclease domain (e.g., as described herein, e.g., in the endonuclease domain section), or a functional fragment thereof. In some embodiments, the meganuclease domain possesses endonuclease activity, e.g., double-strand cleavage and/or nickase activity. In other embodiments, the meganuclease domain has reduced activity, e.g., lacks endonuclease activity, e.g., the meganuclease is catalytically inactive. In some embodiments, a catalytically inactive meganuclease is used as a DNA binding domain, e.g., as described in Fonfara et al. Nucleic Acids Res 40(2):847-860 (2012), incorporated herein by reference in its entirety. In embodiments, the DNA binding domain comprises one or more modifications relative to a wild-type DNA binding domain, e.g., a modification via directed evolution, e.g., phage-assisted continuous evolution (PACE).

[0505] In certain aspects of the present invention, the host DNA-binding site integrated into by the Gene Writer system can be in a gene, in an intron, in an exon, an ORF, outside of a coding region of any gene, in a regulatory region of a gene, or outside of a regulatory region of a gene. In other aspects, the engineered retrotransposon may bind to one or more than one host DNA sequence. In other aspects, the engineered retrotransposon may have low sequence specificity, e.g., bind to multiple sequences or lack sequence preference.

[0506] In some embodiments, a Gene Writing system is used to edit a target locus in multiple alleles. In some embodiments, a Gene Writing system is designed to edit a specific allele. For example, a Gene Writing polypeptide may be directed to a specific sequence that is only present on one allele, but not to a second cognate allele. In some embodiments, a Gene Writing system can alter a haplotype-specific allele. In some embodiments, a Gene Writing system that targets a specific allele preferentially targets that allele, e.g., has at least a 2, 4, 6, 8, or 10-fold preference for a target allele.

### RNase H Domain:

[0507] In certain aspects of the present invention, the RNase H domain of the Gene Writer system is based on an RNase H domain of an LTR retrotransposon. In some embodiments, a Gene Writer polypeptide described herein comprises an RNase H domain, e.g., wherein the RNase H domain may be part of the RT domain. In some embodiments, an RT domain (e.g., as described herein) comprises an RNase H domain, e.g., an endogenous RNase H domain or a heterologous RNase H domain. In some embodiments, an RT domain (e.g., as described herein) lacks an RNase H domain. In some embodiments, an RT domain (e.g., as described herein) comprises an RNase H domain that has been added, deleted, mutated, or swapped for a heterologous RNase H domain. In some embodiments, mutation of an RNase H domain yields a polypeptide exhibiting lower RNase activity, e.g., as determined by the methods described in Kotewicz et al. Nucleic Acids Res 16(1):265-277 (1988) (incorporated herein by reference in its entirety), e.g., lower by at least 10%, 20%, 30%, 40%, 50%, 60%, 70%, 80%, or 90% compared to an otherwise similar domain without the mutation. In some embodiments, RNase H activity is abolished.

### Linker Domains:

[0508] In some embodiments, a Gene Writer polypeptide may comprise a linker, e.g., a peptide linker, e.g., a linker as described in Table 7. In some embodiments, a Gene Writer polypeptide comprises a flexible linker between the domains, e.g., a linker comprising the amino acid sequence SGGSSGGSSGSETPGTSESATPESSGGSSGGSS (SEQ TD NO: 14).

TABLE 7
Exemplary linker sequences

| | SEQ |
|---|---|
| | ID |
| Amino Acid Sequence | NO: |
| GGS | |
| GGSGGS | 15 |
| GGSGGSGGS | 16 |
| GGSGGSGGSGGS | 17 |
| GGSGGSGGSGGSGGS | 18 |
| GGSGGSGGSGGSGGSGGS | 19 |
| GGGGS | 20 |
| GGGGSGGGGS | 21 |
| GGGGSGGGGSGGGGS | 22 |
| GGGGSGGGGSGGGGSGGGGS | 23 |
| GGGGSGGGGSGGGGSGGGGSGGGGS | 24 |
| GGGGSGGGGSGGGGSGGGGSGGGGSGGGGS | 25 |
| GGG | |
| GGGG | 26 |
| GGGGG | 27 |
| GGGGGG | 28 |
| GGGGGGG | 29 |
| GGGGGGGG | 30 |
| GSS | |
| GSSGSS | 31 |
| GSSGSSGSS | 32 |
| GSSGSSGSSGSS | 33 |
| GSSGSSGSSGSSGSS | 34 |
| GSSGSSGSSGSSGSSGSS | 35 |
| EAAAK | 36 |
| EAAAKEAAAK | 37 |
| EAAAKEAAAKEAAAK | 38 |
| EAAAKEAAAKEAAAKEAAAK | 39 |
| EAAAKEAAAKEAAAKEAAAKEAAAK | 40 |
| EAAAKEAAAKEAAAKEAAAKEAAAKEAAAK | 41 |
| PAP | |
| PAPAP | 42 |
| PAPAPAP | 43 |
| PAPAPAPAP | 44 |
| PAPAPAPAPAP | 45 |
| PAPAPAPAPAPAP | 46 |
| GGSGGG | 47 |
| GGGGGS | 48 |
| GGSGSS | 49 |
| GSSGGS | 50 |
| GGSEAAAK | 51 |
| EAAAKGGS | 52 |
| GGSPAP | 53 |
| PAPGGS | 54 |
| GGGGSS | 55 |
| GSSGGG | 56 |
| GGGEAAAK | 57 |
| EAAAKGGG | 58 |
| GGGPAP | 59 |
| PAPGGG | 60 |
| GSSEAAAK | 61 |
| EAAAKGSS | 62 |
| GSSPAP | 63 |
| PAPGSS | 64 |
| EAAAKPAP | 65 |
| PAPEAAAK | 66 |
| GGSGGGGSS | 67 |
| GGSGSSGGG | 68 |
| GGGGGSGSS | 69 |
| GGGGSSGGS | 70 |
| GSSGGSGGG | 71 |
| GSSGGGGGS | 72 |
| GGSGGGEAAAK | 73 |
| GGSEAAAKGGG | 74 |
| GGGGGSEAAAK | 75 |
| GGGEAAAKGGS | 76 |
| EAAAKGGSGGG | 77 |
| EAAAKGGGGGS | 78 |
| GGSGGGPAP | 79 |
| GGSPAPGGG | 80 |
| GGGGGSPAP | 81 |
| GGGPAPGGS | 82 |
| PAPGGSGGG | 83 |
| PAPGGGGGS | 84 |
| GGSGSSEAAAK | 85 |
| GGSEAAAKGSS | 86 |
| GSSGGSEAAAK | 87 |
| GSSEAAAKGGS | 88 |
| EAAAKGGSGSS | 89 |
| EAAAKGSSGGS | 90 |
| GGSGSSPAP | 91 |
| GGSPAPGSS | 92 |
| GSSGGSPAP | 93 |
| GSSPAPGGS | 94 |
| PAPGGSGSS | 95 |
| PAPGSSGGS | 96 |
| GGSEAAAKPAP | 97 |
| GGSPAPEAAAK | 98 |
| EAAAKGGSPAP | 99 |
| EAAAKPAPGGS | 100 |
| PAPGGSEAAAK | 101 |
| PAPEAAAKGGS | 102 |
| GGGGSSEAAAK | 103 |
| GGGEAAAKGSS | 104 |
| GSSGGGEAAAK | 105 |
| GSSEAAAKGGG | 106 |
| EAAAKGGGGSS | 107 |
| EAAAKGSSGGG | 108 |
| GGGGSSPAP | 109 |
| GGGPAPGSS | 110 |
| GSSGGGPAP | 111 |
| GSSPAPGGG | 112 |
| PAPGGGGSS | 113 |
| PAPGSSGGG | 114 |
| GGGEAAAKPAP | 115 |
| GGGPAPEAAAK | 116 |
| EAAAKGGGPAP | 117 |
| EAAAKPAPGGG | 118 |
| PAPGGGEAAAK | 119 |
| PAPEAAAKGGG | 120 |
| GSSEAAAKPAP | 121 |
| GSSPAPEAAAK | 122 |
| EAAAKGSSPAP | 123 |
| EAAAKPAPGSS | 124 |
| PAPGSSEAAAK | 125 |
| PAPEAAAKGSS | 126 |
| AEAAAKEAAAKEAAAKEAAAKALEAEAAAKEAAAKEAAAKE | 127 |
| AAAKA | |
| GGGGSEAAAKGGGGS | 128 |
| EAAAKGGGGSEAAAK | 129 |
| SGSETPGTSESATPES | 130 |
| GSAGSAAGSGEF | 131 |
| SGGSSGGSSGSETPGTSESATPESSGGSSGGSS | 14 |

### Nucleic Acid Molecules

### Circular RNAs

[0509] It is contemplated that it may be useful to employ circular and/or linear RNA states during the formulation, delivery, or Gene Writing reaction within the target cell. Thus, in some embodiments of any of the aspects described herein, a Gene Writing system comprises one or more circular RNAs (circRNAs). In some embodiments of any of the aspects described herein, a Gene Writing system comprises one or more linear RNAs. In some embodiments, a nucleic acid as described herein (e.g., a template nucleic acid, a nucleic acid molecule encoding a Gene Writer polypeptide, or both) is a circRNA. In some embodiments, a circular RNA molecule encodes the Gene Writer polypeptide. In some embodiments, the circRNA molecule encoding the Gene Writer polypeptide is delivered to a host cell. In some embodiments, a circular RNA molecule encodes a recombinase, e.g., as described herein. In some embodiments, the circRNA molecule encoding the recombinase is delivered to a host cell. In some embodiments, the circRNA molecule encoding the Gene Writer polypeptide is linearized (e.g., in the host cell, e.g., in the nucleus of the host cell) prior to translation.

[0510] Circular RNAs (circRNAs) have been found to occur naturally in cells and have been found to have diverse functions, including both non-coding and protein coding roles in human cells. It has been shown that a circRNA can be engineered by incorporating a self-splicing intron into an RNA molecule (or DNA encoding the RNA molecule) that results in circularization of the RNA, and that an engineered circRNA can have enhanced protein production and stability (Wesselhoeft et al. Nature Communications 2018). In some embodiments, the Gene Writer™ polypeptide is encoded as circRNA. In certain embodiments, the template nucleic acid is a DNA, such as a dsDNA or ssDNA.

[0511] In some embodiments, the circRNA comprises one or more ribozyme sequences. In some embodiments, the ribozyme sequence is activated for autocleavage, e.g., in a host cell, e.g., thereby resulting in linearization of the circRNA. In some embodiments, the ribozyme is activated when the concentration of magnesium reaches a sufficient level for cleavage, e.g., in a host cell. In some embodiments the circRNA is maintained in a low magnesium environment prior to delivery to the host cell. In some embodiments, the ribozyme is a protein-responsive ribozyme. In some embodiments, the ribozyme is a nucleic acid-responsive ribozyme. In some embodiments, the circRNA comprises a cleavage site. In some embodiments, the circRNA comprises a second cleavage site.

[0512] In some embodiments, the circRNA is linearized in the nucleus of a target cell. In some embodiments, linearization of a circRNA in the nucleus of a cell involves components present in the nucleus of the cell, e.g., to activate a cleavage event. For example, the B2 and ALU retrotransposons contain self-cleaving ribozymes whose activity is enhanced by interaction with the Polycomb protein, EZH2 (Hernandez et al. PNAS 117(1):415-425 (2020)). Thus, in some embodiments, a ribozyme, e.g., a ribozyme from a B2 or ALU element, that is responsive to a nuclear element, e.g., a nuclear protein, e.g., a genome-interacting protein, e.g., an epigenetic modifier, e.g., EZH2, is incorporated into a circRNA, e.g., of a Gene Writing system. In some embodiments, nuclear localization of the circRNA results in an increase in autocatalytic activity of the ribozyme and linearization of the circRNA.

[0513] In some embodiments, the ribozyme is heterologous to one or more of the other components of the Gene Writing system. In some embodiments, an inducible ribozyme (e.g., in a circRNA as described herein) is created synthetically, for example, by utilizing a protein ligand-responsive aptamer design. A system for utilizing the satellite RNA of tobacco ringspot virus hammerhead ribozyme with an MS2 coat protein aptamer has been described (Kennedy et al. Nucleic Acids Res 42(19):12306-12321 (2014), incorporated herein by reference in its entirety) that results in activation of the ribozyme activity in the presence of the MS2 coat protein. In embodiments, such a system responds to protein ligand localized to the cytoplasm or the nucleus. In some embodiments the protein ligand is not MS2. Methods for generating RNA aptamers to target ligands have been described, for example, based on the systematic evolution of ligands by exponential enrichment (SELEX) (Tuerk and Gold, Science 249(4968):505-510 (1990); Ellington and Szostak, Nature 346(6287):818-822 (1990); the methods of each of which are incorporated herein by reference) and have, in some instances, been aided by in silico design (Bell et al. PNAS 117(15):8486-8493, the methods of which are incorporated herein by reference). Thus, in some embodiments, an aptamer for a target ligand is generated and incorporated into a synthetic ribozyme system, e.g., to trigger ribozyme-mediated cleavage and circRNA linearization, e.g., in the presence of the protein ligand. In some embodiments, circRNA linearization is triggered in the cytoplasm, e.g., using an aptamer that associates with a ligand in the cytoplasm. In some embodiments, circRNA linearization is triggered in the nucleus, e.g., using an aptamer that associates with a ligand in the nucleus. In embodiments, the ligand in the nucleus comprises an epigenetic modifier or a transcription factor. In some embodiments the ligand that triggers linearization is present at higher levels in on-target cells than off-target cells.

[0514] It is further contemplated that a nucleic acid-responsive ribozyme system can be employed for circRNA linearization. For example, biosensors that sense defined target nucleic acid molecules to trigger ribozyme activation are described, e.g., in Penchovsky (Biotechnology Advances 32(5):1015-1027 (2014), incorporated herein by reference). By these methods, a ribozyme naturally folds into an inactive state and is only activated in the presence of a defined target nucleic acid molecule (e.g., an RNA molecule). In some embodiments, a circRNA of a Gene Writing system comprises a nucleic acid-responsive ribozyme that is activated in the presence of a defined target nucleic acid, e.g., an RNA, e.g., an mRNA, miRNA, guide RNA, gRNA, sgRNA, ncRNA, lncRNA, tRNA, snRNA, or mtRNA. In some embodiments the nucleic acid that triggers linearization is present at higher levels in on-target cells than off-target cells.

[0515] In some embodiments of any of the aspects herein, a Gene Writing system incorporates one or more ribozymes with inducible specificity to a target tissue or target cell of interest, e.g., a ribozyme that is activated by a ligand or nucleic acid present at higher levels in a target tissue or target cell of interest. In some embodiments, the Gene Writing system incorporates a ribozyme with inducible specificity to a subcellular compartment, e.g., the nucleus, nucleolus, cytoplasm, or mitochondria. In some embodiments, the ribozyme that is activated by a ligand or nucleic acid present at higher levels in the target subcellular compartment. In some embodiments, an RNA component of a Gene Writing system is provided as circRNA, e.g., that is activated by linearization. In some embodiments, linearization of a circRNA encoding a Gene Writing polypeptide activates the molecule for translation. In some embodiments, a signal that activates a circRNA component of a Gene Writing system is present at higher levels in on-target cells or tissues, e.g., such that the system is specifically activated in these cells.

[0516] In some embodiments, an RNA component of a Gene Writing system is provided as a circRNA that is inactivated by linearization. In some embodiments, a circRNA encoding the Gene Writer polypeptide is inactivated by cleavage and degradation. In some embodiments, a circRNA encoding the Gene Writing polypeptide is inactivated by cleavage that separates a translation signal from the coding sequence of the polypeptide. In some embodiments, a signal that inactivates a circRNA component of a Gene Writing system is present at higher levels in off-target cells or tissues, such that the system is specifically inactivated in these cells.

### Doggybone DNA

[0517] In some embodiments, nucleic acid (e.g., encoding a polypeptide, or a template DNA, or both) delivered to cells is covalently closed linear DNA, or so-called “doggybone” DNA. During its lifecycle, the bacteriophage N15 employs protelomerase to convert its genome from circular plasmid DNA to a linear plasmid DNA (Ravin et al. J Mol Biol 2001). This process has been adapted for the production of covalently closed linear DNA in vitro (see, for example, WO2010086626A1). In some embodiments, a protelomerase is contacted with a DNA containing one or more protelomerase recognition sites, wherein protelomerase results in a cut at the one or more sites and subsequent ligation of the complementary strands of DNA, resulting in the covalent linkage between the complementary strands. In some embodiments, nucleic acid (e.g., encoding a transposase, or a template DNA, or both) is first generated as circular plasmid DNA containing a single protelomerase recognition site that is then contacted with protelomerase to yield a covalently closed linear DNA. In some embodiments, nucleic acid (e.g., encoding a transposase, or a template DNA, or both) flanked by protelomerase recognition sites on plasmid or linear DNA is contacted with protelomerase to generate a covalently closed linear DNA containing only the DNA contained between the protelomerase recognition sites. In some embodiments, the approach of flanking the desired nucleic acid sequence by protelomerase recognition sites results in covalently closed circular DNA lacking plasmid elements used for bacterial cloning and maintenance. In some embodiments, the plasmid or linear DNA containing the nucleic acid and one or more protelomerase recognition sites is optionally amplified prior to the protelomerase reaction, e.g., by rolling circle amplification or PCR.

### Chemically Modified Nucleic Acids and Nucleic Acid End Features:

[0518] A nucleic acid described herein (e.g., a template nucleic acid, e.g., a template RNA; or a nucleic acid (e.g., mRNA) encoding a GeneWriter) can comprise unmodified or modified nucleobases. Naturally occurring RNAs are synthesized from four basic ribonucleotides: ATP, CTP, UTP and GTP, but may contain post-transcriptionally modified nucleotides. Further, approximately one hundred different nucleoside modifications have been identified in RNA (Rozenski, J, Crain, P, and McCloskey, J. (1999). The RNA Modification Database: 1999 update. Nucl Acids Res 27:196-197). An RNA can also comprise wholly synthetic nucleotides that do not occur in nature.

[0519] In some embodiments, the chemically modification is one provided in PCT/US2016/032454, US Pat. Pub. No. 20090286852, of International Application No. WO/2012/019168, WO/2012/045075, WO/2012/135805, WO/2012/158736, WO/2013/039857, WO/2013/039861, WO/2013/052523, WO/2013/090648, WO/2013/096709, WO/2013/101690, WO/2013/106496, WO/2013/130161, WO/2013/151669, WO/2013/151736, WO/2013/151672, WO/2013/151664, WO/2013/151665, WO/2013/151668, WO/2013/151671, WO/2013/151667, WO/2013/151670, WO/2013/151666, WO/2013/151663, WO/2014/028429, WO/2014/081507, WO/2014/093924, WO/2014/093574, WO/2014/113089, WO/2014/144711, WO/2014/144767, WO/2014/144039, WO/2014/152540, WO/2014/152030, WO/2014/152031, WO/2014/152027, WO/2014/152211, WO/2014/158795, WO/2014/159813, WO/2014/164253, WO/2015/006747, WO/2015/034928, WO/2015/034925, WO/2015/038892, WO/2015/048744, WO/2015/051214, WO/2015/051173, WO/2015/051169, WO/2015/058069, WO/2015/085318, WO/2015/089511, WO/2015/105926, WO/2015/164674, WO/2015/196130, WO/2015/196128, WO/2015/196118, WO/2016/011226, WO/2016/011222, WO/2016/011306, WO/2016/014846, WO/2016/022914, WO/2016/036902, WO/2016/077125, or WO/2016/077123, each of which is herein incorporated by reference in its entirety. It is understood that incorporation of a chemically modified nucleotide into a polynucleotide can result in the modification being incorporated into a nucleobase, the backbone, or both, depending on the location of the modification in the nucleotide. In some embodiments, the backbone modification is one provided in EP 2813570, which is herein incorporated by reference in its entirety. In some embodiments, the modified cap is one provided in US Pat. Pub. No. 20050287539, which is herein incorporated by reference in its entirety.

[0520] In some embodiments, the chemically modified nucleic acid (e.g., RNA, e.g., mRNA) comprises one or more of ARCA: anti-reverse cap analog (m27.3′-OGP3G), GP3G (Unmethylated Cap Analog), m7GP3G (Monomethylated Cap Analog), m32.2.7GP3G (Trimethylated Cap Analog), m5CTP (5′-methyl-cytidine triphosphate), m6ATP (N6-methyl-adenosine-5′-triphosphate), s2UTP (2-thio-uridine triphosphate), and Ψ (pseudouridine triphosphate).

[0521] In some embodiments, the chemically modified nucleic acid comprises a 5′ cap, e.g.: a 7-methylguanosine cap (e.g., a 0-Me-m7G cap); a hypermethylated cap analog; an NAD+-derived cap analog (e.g., as described in Kiledjian, Trends in Cell Biology 28, 454-464 (2018)); or a modified, e.g., biotinylated, cap analog (e.g., as described in Bednarek et al., Phil Trans R Soc B 373, 20180167 (2018)).

[0522] In some embodiments, the chemically modified nucleic acid comprises a 3′ feature selected from one or more of: a polyA tail; a 16-nucleotide long stem-loop structure flanked by unpaired 5 nucleotides (e.g., as described by Mannironi et al., Nucleic Acid Research 17, 9113-9126 (1989)); a triple-helical structure (e.g., as described by Brown et al., PNAS 109, 19202-19207 (2012)); a tRNA, Y RNA, or vault RNA structure (e.g., as described by Labno et al., Biochemica et Biophysica Acta 1863, 3125-3147 (2016)); incorporation of one or more deoxyribonucleotide triphosphates (dNTPs), 2′O-Methylated NTPs, or phosphorothioate-NTPs; a single nucleotide chemical modification (e.g., oxidation of the 3′ terminal ribose to a reactive aldehyde followed by conjugation of the aldehyde-reactive modified nucleotide); or chemical ligation to another nucleic acid molecule.

[0523] In some embodiments, the nucleic acid (e.g., template nucleic acid) comprises one or more modified nucleotides, e.g., selected from dihydrouridine, inosine, 7-methylguanosine, 5-methylcytidine (5mC), 5′ Phosphate ribothymidine, 2′-O-methyl ribothymidine, 2′-O-ethyl ribothymidine, 2′-fluoro ribothymidine, C-5 propynyl-deoxycytidine (pdC), C-5 propynyl-deoxyuridine (pdU), C-5 propynyl-cytidine (pC), C-5 propynyl-uridine (pU), 5-methyl cytidine, 5-methyl uridine, 5-methyl deoxycytidine, 5-methyl deoxyuridine methoxy, 2,6-diaminopurine, 5′-Dimethoxytrityl-N4-ethyl-2′-deoxycytidine, C-5 propynyl-f-cytidine (pfC), C-5 propynyl-f-uridine (pfU), 5-methyl f-cytidine, 5-methyl f-uridine, C-5 propynyl-m-cytidine (pmC), C-5 propynyl-f-uridine (pmU), 5-methyl m-cytidine, 5-methyl m-uridine, LNA (locked nucleic acid), MGB (minor groove binder) pseudouridine (Ψ), 1-N-methylpseudouridine (1-Me-Ψ), or 5-methoxyuridine (5-MO-U).

[0524] In some embodiments, the nucleic acid comprises a backbone modification, e.g., a modification to a sugar or phosphate group in the backbone. In some embodiments, the nucleic acid comprises a nucleobase modification.

[0525] In some embodiments, the nucleic acid comprises one or more chemically modified nucleotides of Table M1, one or more chemical backbone modifications of Table M2, one or more chemically modified caps of Table M3. For instance, in some embodiments, the nucleic acid comprises two or more (e.g., 3, 4, 5, 6, 7, 8, 9, or 10 or more) different types of chemical modifications. As an example, the nucleic acid may comprise two or more (e.g., 3, 4, 5, 6, 7, 8, 9, or 10 or more) different types of modified nucleobases, e.g., as described herein, e.g., in Table M1. Alternatively or in combination, the nucleic acid may comprise two or more (e.g., 3, 4, 5, 6, 7, 8, 9, or 10 or more) different types of backbone modifications, e.g., as described herein, e.g., in Table M2. Alternatively or in combination, the nucleic acid may comprise one or more modified cap, e.g., as described herein, e.g., in Table M3. For instance, in some embodiments, the nucleic acid comprises one or more type of modified nucleobase and one or more type of backbone modification; one or more type of modified nucleobase and one or more modified cap; one or more type of modified cap and one or more type of backbone modification; or one or more type of modified nucleobase, one or more type of backbone modification, and one or more type of modified cap.

[0526] In some embodiments, the nucleic acid comprises one or more (e.g., 2, 3, 4, 5, 6, 7, 8, 9, 10, 20, 30, 40, 50, 60, 70, 80, 90, 100, 150, 200, 250, 300, 350, 400, 450, 500, 600, 700, 800, 900, 1000, or more) modified nucleobases. In some embodiments, all nucleobases of the nucleic acid are modified. In some embodiments, the nucleic acid is modified at one or more (e.g., 2, 3, 4, 5, 6, 7, 8, 9, 10, 20, 30, 40, 50, 60, 70, 80, 90, 100, 150, 200, 250, 300, 350, 400, 450, 500, 600, 700, 800, 900, 1000, or more) positions in the backbone. In some embodiments, all backbone positions of the nucleic acid are modified.

TABLE M1
Modified nucleotides

| | |
|---|---|
| 5-aza-uridine | N2-methyl-6-thio-guanosine |
| 2-thio-5-aza-midine | N2,N2-dimethyl-6-thio-guanosine |
| 2-thiouridine | pyridin-4-one ribonucleoside |
| 4-thio-pseudouridine | 2-thio-5-aza-uridine |
| 2-thio-pseudouridine | 2-thiomidine |
| 5-hydroxyuridine | 4-thio-pseudomidine |
| 3-methyluridine | 2-thio-pseudowidine |
| 5-carboxymethyl-uridine | 3-methylmidine |
| 1-carboxymethyl-pseudouridine | 1-propynyl-pseudomidine |
| 5-propynyl-uridine | 1-methyl-1-deaza-pseudomidine |
| 1-propynyl-pseudouridine | 2-thio-1-methyl-1-deaza-pseudouridine |
| 5-taurinomethyluridine | 4-methoxy-pseudomidine |
| 1-taurinomethyl-pseudouridine | 5′-O-(1-Thiophosphate)-Adenosine |
| 5-taurinomethyl-2-thio-uridine | 5′-O-(1-Thiophosphate)-Cytidine |
| 1-taurinomethyl-4-thio-uridine | 5′-O-(1-thiophosphate)-Guanosine |
| 5-methyl-uridine | 5′-O-(1-Thiophophate)-Uridine |
| 1-methyl-pseudouridine | 5′-O-(1-Thiophosphate)-Pseudouridine |
| 4-thio-1-methyl-pseudouridine | 2′-O-methyl-Adenosine |
| 2-thio-1-methyl-pseudouridine | 2′-O-methyl-Cytidine |
| 1-methyl-1-deaza-pseudouridine | 2′-O-methyl-Guanosine |
| 2-thio-1-methyl-1-deaza-pseudomidine | 2′-O-methyl-Uridine |
| dihydrouridine | 2′-O-methyl-Pseudouridine |
| dihydropseudouridine | 2′-O-methyl-Inosine |
| 2-thio-dihydromidine | 2-methyladenosine |
| 2-thio-dihydropseudouridine | 2-methylthio-N6-methyladenosine |
| 2-methoxyuridine | 2-methylthio-N6 isopentenyladenosine |
| 2-methoxy-4-thio-uridine | 2-methylthio-N6-(cis- |
| 4-methoxy-pseudouridine | hydroxyisopentenyl)adenosine |
| 4-methoxy-2-thio-pseudouridine | N6-methyl-N6-threonylcarbamoyladenosine |
| 5-aza-cytidine | N6-hydroxynorvalylcarbamoyladenosine |
| pseudoisocytidine | 2-methylthio-N6-hydroxynorvalyl |
| 3-methyl-cytidine | carbamoyladenosine |
| N4-acetylcytidine | 2′-O-ribosyladenosine (phosphate) |
| 5-formylcytidine | 1,2′-O-dimethylinosine |
| N4-methylcytidine | 5,2′-O-dimethylcytidine |
| 5-hydroxymethylcytidine | N4-acetyl-2′-O-methylcytidine |
| 1-methyl-pseudoisocytidine | Lysidine |
| pyrrolo-cytidine | 7-methylguanosine |
| pyrrolo-pseudoisocytidine | N2,2′-O-dimethylguanosine |
| 2-thio-cytidine | N2,N2,2′-O-trimethylguanosine |
| 2-thio-5-methyl-cytidine | 2′-O-ribosylguanosine (phosphate) |
| 4-thio-pseudoisocytidine | Wybutosine |
| 4-thio-1-methyl-pseudoisocytidine | Peroxywybutosine |
| 4-thio-1-methyl-1-deaza-pseudoisocytidine | Hydroxywybutosine |
| 1-methyl-1-deaza-pseudoisocytidine | undermodified hydroxywybutosine |
| zebularine | methylwyosine |
| 5-aza-zebularine | queuosine |
| 5-methyl-zebularine | epoxyqueuosine |
| 5-aza-2-thio-zebularine | galactosyl-queuosine |
| 2-thio-zebularine | mannosyl-queuosine |
| 2-methoxy-cytidine | 7-cyano-7-deazaguanosine |
| 2-methoxy-5-methyl-cytidine | 7-aminomethyl-7-deazaguanosine |
| 4-methoxy-pseudoisocytidine | archaeosine |
| 4-methoxy-1-methyl-pseudoisocytidine | 5,2′-O-dimethyluridine |
| 2-aminopurine | 4-thiouridine |
| 2,6-diaminopurine | 5-methyl-2-thiouridine |
| 7-deaza-adenine | 2-thio-2′-O-methyluridine |
| 7-deaza-8-aza-adenine | 3-(3-amino-3-carboxypropyl)uridine |
| 7-deaza-2-aminopurine | 5-methoxyuridine |
| 7-deaza-8-aza-2-aminopurine | uridine 5-oxyacetic acid |
| 7-deaza-2,6-diaminopurine | uridine 5-oxyacetic acid methyl ester |
| 7-deaza-8-aza-2,6-diaminopurine | 5-(carboxyhydroxymethyl)uridine) |
| 1-methyladenosine | 5-(carboxyhydroxymethyl)uridine methyl ester |
| N6-isopentenyladenosine | 5-methoxycarbonylmethyluridine |
| N6-(cis-hydroxyisopentenyl)adenosine | 5-methoxycarbonylmethyl-2′-O-methyluridine |
| 2-methylthio-N6-(cis-hydroxyisopentenyl) | 5-methoxycarbonylmethyl-2-thiouridine |
| adenosine | 5-aminomethyl-2-thiouridine |
| N6-glycinylcarbamoyladenosine | 5-methylaminomethyluridine |
| N6-threonylcarbamoyladenosine | 5-methylaminomethyl-2-thiouridine |
| 2-methylthio-N6-threonyl carbamoyladenosine | 5-methylaminomethyl-2-selenouridine |
| N6,N6-dimethyladenosine | 5-carbamoylmethyluridine |
| 7-methyladenine | 5-carbamoylmethyl-2′-O-methyluridine |
| 2-methylthio-adenine | 5-carboxymethylaminomethyluridine |
| 2-methoxy-adenine | 5-carboxymethylaminomethyl-2′-O-methyluridine |
| inosine | 5-carboxymethylaminomethyl-2-thiouridine |
| 1-methyl-inosine | N4,2′-O-dimethylcytidine |
| wyosine | 5-carboxymethyluridine |
| wybutosine | N6,2′-O-dimethyladenosine |
| 7-deaza-guanosine | N,N6,O-2′-trimethyladenosine |
| 7-deaza-8-aza-guanosine | N2,7-dimethylguanosine |
| 6-thio-guanosine | N2,N2,7-trimethylguanosine |
| 6-thio-7-deaza-guanosine | 3,2′-O-dimethyluridine |
| 6-thio-7-deaza-8-aza-guanosine | 5-methyldihydrouridine |
| 7-methyl-guanosine | 5-formyl-2′-O-methylcytidine |
| 6-thio-7-methyl-guanosine | 1,2′-O-dimethylguanosine |
| 7-methylinosine | 4-demethylwyosine |
| 6-methoxy-guanosine | Isowyosine |
| 1-methylguanosine | N6-acetyladenosine |
| N2-methylguanosine | |
| N2,N2-dimethylguanosine | |
| 8-oxo-guanosine | |
| 7-methyl-8-oxo-guanosine | |
| 1-methyl-6-thio-guanosine | |

TABLE M2
Backbone modifications

2′-O-Methyl backbone
Peptide Nucleic Acid (PNA) backbone
phosphorothioate backbone
morpholino backbone
carbamate backbone
siloxane backbone
sulfide backbone
sulfoxide backbone
sulfone backbone
formacetyl backbone
thioformacetyl backbone
methyleneformacetyl backbone
riboacetyl backbone
alkene containing backbone
sulfamate backbone
sulfonate backbone
sulfonamide backbone
methyleneimino backbone
methylenehydrazino backbone
amide backbone

TABLE M3
Modified caps

m7GpppA
m7GpppC
m2,7GpppG
m2,2,7GpppG
m7Gpppm7G
m7,2′OmeGpppG
m72′dGpppG
m7,3′OmeGpppG
m7,3′dGpppG
GppppG
m7GppppG
m7GppppA
m7GppppC
m2,7GppppG
m2,2,7GppppG
m7Gppppm7G
m7,2OmeGppppG
m72′dGppppG
m7,3′OmeGppppG
m7,3′dGppppG

### Production of Compositions and Systems

[0527] Methods of designing and constructing nucleic acid constructs and proteins or polypeptides (such as the systems, constructs and polypeptides described herein) are known. Generally, recombinant methods may be used. See, in general, Smales & James (Eds.), Therapeutic Proteins: Methods and Protocols (Methods in Molecular Biology), Humana Press (2005); and Crommelin, Sindelar & Meibohm (Eds.), Pharmaceutical Biotechnology: Fundamentals and Applications, Springer (2013). Methods of designing, preparing, evaluating, purifying and manipulating nucleic acid compositions are described in Green and Sambrook (Eds.), Molecular Cloning: A Laboratory Manual (Fourth Edition), Cold Spring Harbor Laboratory Press (2012).

[0528] The disclosure provides, in part, a nucleic acid, e.g., vector, encoding a Gene Writer polypeptide described herein, a template nucleic acid described herein, or both. In some embodiments, a vector comprises a selective marker, e.g., an antibiotic resistance marker. In some embodiments, the antibiotic resistance marker is a kanamycin resistance marker. In some embodiments, the antibiotic resistance marker does not confer resistance to beta-lactam antibiotics. In some embodiments, the vector does not comprise an ampicillin resistance marker. In some embodiments, the vector comprises a kanamycin resistance marker and does not comprise an ampicillin resistance marker. In some embodiments, a vector encoding a Gene Writer polypeptide is integrated into a target cell genome (e.g., upon administration to a target cell, tissue, organ, or subject). In some embodiments, a vector encoding a Gene Writer polypeptide is not integrated into a target cell genome (e.g., upon administration to a target cell, tissue, organ, or subject). In some embodiments, a vector encoding a template nucleic acid (e.g., template RNA) is not integrated into a target cell genome (e.g., upon administration to a target cell, tissue, organ, or subject). In some embodiments, if a vector is integrated into a target site in a target cell genome, the selective marker is not integrated into the genome. In some embodiments, if a vector is integrated into a target site in a target cell genome, genes or sequences involved in vector maintenance (e.g., plasmid maintenance genes) are not integrated into the genome. In some embodiments, if a vector is integrated into a target site in a target cell genome, transfer regulating sequences (e.g., inverted terminal repeats, e.g., from an AAV) are not integrated into the genome. In some embodiments, administration of a vector (e.g., encoding a Gene Writer polypeptide described herein, a template nucleic acid described herein, or both) to a target cell, tissue, organ, or subject results in integration of a portion of the vector into one or more target sites in the genome(s) of said target cell, tissue, organ, or subject. In some embodiments, less than 99, 95, 90, 80, 70, 60, 50, 40, 30, 20, 10, 5, 4, 3, 2, or 1% of target sites (e.g., no target sites) comprising integrated material comprise a selective marker (e.g., an antibiotic resistance gene), a transfer regulating sequence (e.g., an inverted terminal repeat, e.g., from an AAV), or both from the vector.

[0529] Exemplary methods for producing a therapeutic pharmaceutical protein or polypeptide described herein involve expression in mammalian cells, although recombinant proteins can also be produced using insect cells, yeast, bacteria, or other cells under control of appropriate promoters. Mammalian expression vectors may comprise non-transcribed elements such as an origin of replication, a suitable promoter, and other 5′ or 3′ flanking non-transcribed sequences, and 5′ or 3′ non-translated sequences such as necessary ribosome binding sites, a polyadenylation site, splice donor and acceptor sites, and termination sequences. DNA sequences derived from the SV40 viral genome, for example, SV40 origin, early promoter, splice, and polyadenylation sites may be used to provide other genetic elements required for expression of a heterologous DNA sequence. Appropriate cloning and expression vectors for use with bacterial, fungal, yeast, and mammalian cellular hosts are described in Green & Sambrook, Molecular Cloning: A Laboratory Manual (Fourth Edition), Cold Spring Harbor Laboratory Press (2012).

[0530] Various mammalian cell culture systems can be employed to express and manufacture recombinant protein. Examples of mammalian expression systems include CHO, COS, HEK293, HeLA, and BHK cell lines. Processes of host cell culture for production of protein therapeutics are described in Zhou and Kantardjieff (Eds.), Mammalian Cell Cultures for Biologics Manufacturing (Advances in Biochemical Engineering/Biotechnology), Springer (2014). Compositions described herein may include a vector, such as a viral vector, e.g., a lentiviral vector, encoding a recombinant protein. In some embodiments, a vector, e.g., a viral vector, may comprise a nucleic acid encoding a recombinant protein.

[0531] Purification of protein therapeutics is described in Franks, Protein Biotechnology: Isolation, Characterization, and Stabilization, Humana Press (2013); and in Cutler, Protein Purification Protocols (Methods in Molecular Biology), Humana Press (2010).

### Production of RNA Components:

[0532] Further included here are compositions and methods for the assembly of full or partial template RNA molecules. In some embodiments, RNA molecules may be assembled by the connection of two or more (e.g., two, three, four, five, six, seven, eight, nine, ten, or more) RNA segments with each other. In an aspect, the disclosure provides methods for producing nucleic acid molecules, the methods comprising contacting two or more linear RNA segments with each other under conditions that allow for the 5′ terminus of a first RNA segment to be covalently linked with the 3′ terminus of a second RNA segment. In some embodiments, the joined molecule may be contacted with a third RNA segment under conditions that allow for the 5′ terminus of the joined molecule to be covalently linked with the 3′ terminus of the third RNA segment. In embodiments, the method further comprises joining a fourth, fifth, or additional RNA segments to the elongated molecule. This form of assembly may, in some instances, allow for rapid and efficient assembly of RNA molecules.

[0533] In some embodiments, RNA segments may be produced by chemical synthesis. In some embodiments, RNA segments may be produced by in vitro transcription of a nucleic acid template, e.g., by providing an RNA polymerase to act on a cognate promoter of a DNA template to produce an RNA transcript. In some embodiments, in vitro transcription is performed using, e.g., a T7, T3, or SP6 RNA polymerase, or a derivative thereof, acting on a DNA, e.g., dsDNA, ssDNA, linear DNA, plasmid DNA, linear DNA amplicon, linearized plasmid DNA, e.g., encoding the RNA segment, e.g., under transcriptional control of a cognate promoter, e.g., a T7, T3, or SP6 promoter. In some embodiments, a combination of chemical synthesis and in vitro transcription is used to generate the RNA segments for assembly. In embodiments, the gRNA, upstream target homology, and Gene Writer polypeptide binding segments are produced by chemical synthesis and the heterologous object sequence segment is produced by in vitro transcription. Without wishing to be bound by theory, in vitro transcription may be better suited for the production of longer RNA molecules. In some embodiments, reaction temperature for in vitro transcription may be lowered, e.g., be less than 37° C. (e.g., between 0-10 C, 10-20 C, or 20-30 C), to result in a higher proportion of full-length transcripts (Krieg Nucleic Acids Res 18:6463 (1990)). In some embodiments, a protocol for improved synthesis of long transcripts is employed to synthesize a long template RNA, e.g., a template RNA greater than 5 kb, such as the use of e.g., T7 RiboMAX Express, which can generate 27 kb transcripts in vitro (Thiel et al. J Gen Virol 82(6):1273-1281 (2001)). In some embodiments, modifications to RNA molecules as described herein may be incorporated during synthesis of RNA segments (e.g., through the inclusion of modified nucleotides or alternative binding chemistries), following synthesis of RNA segments through chemical or enzymatic processes, following assembly of one or more RNA segments, or a combination thereof.

[0534] In some embodiments, an mRNA of the system (e.g., an mRNA encoding a Gene Writer polypeptide) is synthesized in vitro using T7 polymerase-mediated DNA-dependent RNA transcription from a linearized DNA template, where UTP is optionally substituted with 1-methylpseudoUTP. In some embodiments, the transcript incorporates 5′ and 3′ UTRs, e.g., GGGAAAUAAGAGAGAAAAGAAGAGUAAGAAGAAAUAUAAGAGCCACC (SEQ ID NO: 132) and UGAUAAUAGGCUGGAGCCUCGGUGGCCAUGCUUCUUGCCCCUUGGGCCUCCCCCC AGCCCCUCCUCCCCUUCCUGCACCCGUACCCCCGUGGUCUUUGAAUAAAGUCUGA (SEQ ID NO: 133), or functional fragments or variants thereof, and optionally includes a poly-A tail, which can be encoded in the DNA template or added enzymatically following transcription. In some embodiments, a donor methyl group, e.g., S-adenosylmethionine, is added to a methylated capped RNA with cap 0 structure to yield a cap 1 structure that increases mRNA translation efficiency (Richner et al. Cell 168(6): P1114-1125 (2017)).

[0535] In some embodiments, the transcript from a T7 promoter starts with a GGG motif. In some embodiments, a transcript from a T7 promoter does not start with a GGG motif. It has been shown that a GGG motif at the transcriptional start, despite providing superior yield, may lead to T7 RNAP synthesizing a ladder of poly(G) products as a result of slippage of the transcript on the three C residues in the template strand from +1 to +3 (Imburgio et al. Biochemistry 39(34):10419-10430 (2000). For tuning transcription levels and altering the transcription start site nucleotides to fit alternative 5′ UTRs, the teachings of Davidson et al. Pac Symp Biocomput 433-443 (2010) describe T7 promoter variants, and the methods of discovery thereof, that fulfill both of these traits.

[0536] In some embodiments, RNA segments may be connected to each other by covalent coupling. In some embodiments, an RNA ligase, e.g., T4 RNA ligase, may be used to connect two or more RNA segments to each other. When a reagent such as an RNA ligase is used, a 5′ terminus is typically linked to a 3′ terminus. In some embodiments, if two segments are connected, then there are two possible linear constructs that can be formed (i.e., (1) 5′-Segment 1-Segment 2-3′ and (2) 5′-Segment 2-Segment 1-3′). In some embodiments, intramolecular circularization can also occur. Both of these issues can be addressed, for example, by blocking one 5′ terminus or one 3′ terminus so that RNA ligase cannot ligate the terminus to another terminus. In embodiments, if a construct of 5′-Segment 1-Segment 2-3′ is desired, then placing a blocking group on either the 5′ end of Segment 1 or the 3′ end of Segment 2 may result in the formation of only the correct linear ligation product and/or prevent intramolecular circularization. Compositions and methods for the covalent connection of two nucleic acid (e.g., RNA) segments are disclosed, for example, in US20160102322A1 (incorporated herein by reference in its entirety), along with methods including the use of an RNA ligase to directionally ligate two single-stranded RNA segments to each other.

[0537] One example of an end blocker that may be used in conjunction with, for example, T4 RNA ligase, is a dideoxy terminator. T4 RNA ligase typically catalyzes the ATP-dependent ligation of phosphodiester bonds between 5′-phosphate and 3′-hydroxyl termini. In some embodiments, when T4 RNA ligase is used, suitable termini must be present on the termini being ligated. One means for blocking T4 RNA ligase on a terminus comprises failing to have the correct terminus format. Generally, termini of RNA segments with a 5-hydroxyl or a 3′-phosphate will not act as substrates for T4 RNA ligase.

[0538] Additional exemplary methods that may be used to connect RNA segments is by click chemistry (e.g., as described in U.S. Pat. Nos. 7,375,234 and 7,070,941, and US Patent Publication No. 2013/0046084, the entire disclosures of which are incorporated herein by reference). For example, one exemplary click chemistry reaction is between an alkyne group and an azide group (see FIG. 11 of US20160102322A1, which is incorporated herein by reference in its entirety). Any click reaction may potentially be used to link RNA segments (e.g., Cu-azide-alkyne, strain-promoted-azide-alkyne, staudinger ligation, tetrazine ligation, photo-induced tetrazole-alkene, thiol-ene, NHS esters, epoxides, isocyanates, and aldehyde-aminooxy). In some embodiments, ligation of RNA molecules using a click chemistry reaction is advantageous because click chemistry reactions are fast, modular, efficient, often do not produce toxic waste products, can be done with water as a solvent, and/or can be set up to be stereospecific.

[0539] In some embodiments, RNA segments may be connected using an Azide-Alkyne Huisgen Cycloaddition. reaction, which is typically a 1,3-dipolar cycloaddition between an azide and a terminal or internal alkyne to give a 1,2,3-triazole for the ligation of RNA segments. Without wishing to be bound by theory, one advantage of this ligation method may be that this reaction can initiated by the addition of required Cu(I) ions. Other exemplary mechanisms by which RNA segments may be connected include, without limitatoin, the use of halogens (F, Br—, I—)/alkynes addition reactions, carbonyls/sulfhydryls/maleimide, and carboxyl/amine linkages. For example, one RNA molecule may be modified with thiol at 3′ (using disulfide amidite and universal support or disulfide modified support), and the other RNA molecule may be modified with acrydite at 5′ (using acrylic phosphoramidite), then the two RNA molecules can be connected by a Michael addition reaction. This strategy can also be applied to connecting multiple RNA molecules stepwise. Also provided are methods for linking more than two (e.g., three, four, five, six, etc.) RNA molecules to each other. Without wishing to be bound by theory, this may be useful when a desired RNA molecule is longer than about 40 nucleotides, e.g., such that chemical synthesis efficiency degrades, e.g., as noted in US20160102322A1 (incorporated herein by reference in its entirety).

### Kits, Articles of Manufacture, and Pharmaceutical Compositions:

[0540] In an aspect the disclosure provides a kit comprising a Gene Writer or a Gene Writing system, e.g., as described herein. In some embodiments, the kit comprises a Gene Writer polypeptide (or a nucleic acid encoding the polypeptide) and a template RNA (or DNA encoding the template RNA). In some embodiments, the kit further comprises a reagent for introducing the system into a cell, e.g., transfection reagent, LNP, and the like. In some embodiments, the kit is suitable for any of the methods described herein. In some embodiments, the kit comprises one or more elements, compositions (e.g., pharmaceutical compositions), Gene Writers, and/or Gene Writer systems, or a functional fragment or component thereof, e.g., disposed in an article of manufacture. In some embodiments, the kit comprises instructions for use thereof.

[0541] In an aspect, the disclosure provides an article of manufacture, e.g., in which a kit as described herein, or a component thereof, is disposed.

[0542] In an aspect, the disclosure provides a pharmaceutical composition comprising a Gene Writer or a Gene Writing system, e.g., as described herein. In some embodiments, the pharmaceutical composition further comprises a pharmaceutically acceptable carrier or excipient.

[0543] In some embodiments, the pharmaceutical composition comprises a template RNA and/or an RNA encoding the polypeptide. In embodiments, the pharmaceutical composition has one or more (e.g., 1, 2, 3, or 4) of the following characteristics:
[0544] (a) less than 1% (e.g., less than 0.5%, 0.4%, 0.3%, 0.2%, or 0.1%) DNA template relative to the template RNA and/or the RNA encoding the polypeptide, e.g., on a molar basis;
[0545] (b) less than 1% (e.g., less than 0.5%, 0.4%, 0.3%, 0.2%, or 0.1%) uncapped RNA relative to the template RNA and/or the RNA encoding the polypeptide, e.g., on a molar basis;
[0546] (c) less than 1% (e.g., less than 0.5%, 0.4%, 0.3%, 0.2%, or 0.1%) partial length RNAs relative to the template RNA and/or the RNA encoding the polypeptide, e.g., on a molar basis;
[0547] (d) substantially lacks unreacted cap dinucleotides.

### Chemistry, Manufacturing, and Controls (CMC):

[0548] Purification of protein therapeutics is described, for example, in Franks, Protein Biotechnology: Isolation, Characterization, and Stabilization, Humana Press (2013); and in Cutler, Protein Purification Protocols (Methods in Molecular Biology), Humana Press (2010).

[0549] In some embodiments, a Gene Writer™ system, polypeptide or nucleic acid encoding a polypeptide (e.g., mRNA), and/or template nucleic acid (e.g., template RNA) conforms to certain quality standards. In some embodiments, a Gene Writer™ system, polypeptide or nucleic acid encoding a polypeptide (e.g., mRNA), and/or template nucleic acid (e.g., template RNA) produced by a method described herein conforms to certain quality standards. Accordingly, the disclosure is directed, in some aspects, to methods of manufacturing a Gene Writer™ system, polypeptide or nucleic acid encoding a polypeptide (e.g., mRNA), and/or template nucleic acid (e.g., template RNA) that conforms to certain quality standards, e.g., in which said quality standards are assayed. The disclosure is also directed, in some aspects, to methods of assaying said quality standards in a Gene Writer™ system, polypeptide or nucleic acid encoding a polypeptide (e.g., mRNA), and/or template nucleic acid (e.g., template RNA). In some embodiments, quality standards include, but are not limited to:
[0550] (i) the length of an RNA, e.g., an mRNA encoding the GeneWriter polypeptide or a Template RNA, e.g., whether the RNA has a length that is above a reference length or within a reference length range, e.g., whether at least 80, 85, 90, 95, 96, 97, 98, or 99% of the RNA present is greater than 1000, 2000, 3000, 4000, or 5000 nucleotides long;
[0551] (ii) the presence, absence, and/or length of LTRs, e.g., 5′ or 3′ LTRs, in a Template RNA, e.g., whether at least 80, 85, 90, 95, 96, 97, 98, or 99% of the Template RNA present contains full-length 5′ and 3′ LTRs;
[0552] (iii) the presence, absence, and/or length of a polyA tail on the RNA, e.g., whether at least 80, 85, 90, 95, 96, 97, 98, or 99% of the mRNA, or Template RNA, where applicable, present contains a polyA tail (e.g., a polyA tail that is at least 5, 10, 20, 30, 50, 70, 100 nucleotides in length);
[0553] (iv) the presence, absence, and/or type of a 5′ cap on the RNA, e.g., whether at least 80, 85, 90, 95, 96, 97, 98, or 99% of the mRNA, or Template RNA, where applicable, present contains a 5′ cap, e.g., whether that cap is a 7-methylguanosine cap, e.g., a 0-Me-m7G cap;
[0554] (v) the presence, absence, and/or type of one or more modified nucleotides (e.g., selected from pseudouridine, dihydrouridine, inosine, 7-methylguanosine, 1-N-methylpseudouridine (1-Me-Ψ), 5-methoxyuridine (5-MO-U), 5-methylcytidine (5mC), or a locked nucleotide) in the RNA, e.g., whether at least 80, 85, 90, 95, 96, 97, 98, or 99% of the RNA present contains one or more modified nucleotides;
[0555] (vi) the stability of the RNA (e.g., over time and/or under a pre-selected condition), e.g., whether at least 80, 85, 90, 95, 96, 97, 98, or 99% of the RNA remains intact (e.g., greater than 1000, 2000, 3000, 4000, or 5000 nucleotides long) after a stability test; or
[0556] (vii) the potency of the RNA in a system for modifying DNA, e.g., whether at least 1%, 2%, 3%, 4%, 5%, 6%, 7%, 8%, 9%, 10%, 15%, 20%, or at least 25% of cells are modified after a system comprising the RNA is assayed for potency.
[0557] (viii) the length of the polypeptide, first polypeptide, or second polypeptide, e.g., whether the polypeptide, first polypeptide, or second polypeptide has a length that is above a reference length or within a reference length range, e.g., whether at least 80, 85, 90, 95, 96, 97, 98, or 99% of the polypeptide, first polypeptide, or second polypeptide present is greater than 600, 650, 700, 750, 800, 850, 900, 950, 1000, 1050, 1100, 1150, 1200, 1250, 1300, 1350, 1400, 1450, 1500, 1600, 1700, 1800, 1900, or 2000 amino acids long (and optionally, no larger than 2500, 2000, 1500, 1400, 1300, 1200, 1100, 1000, 900, 800, 700, or 600 amino acids long);
[0558] (ix) the presence, absence, and/or type of post-translational modification on the polypeptide, first polypeptide, or second polypeptide, e.g., whether at least 80, 85, 90, 95, 96, 97, 98, or 99% of the polypeptide, first polypeptide, or second polypeptide contains phosphorylation, methylation, acetylation, myristoylation, palmitoylation, isoprenylation, glipyatyon, or lipoylation, or any combination thereof,
[0559] (x) the presence, absence, and/or type of one or more artificial, synthetic, or non-canonical amino acids (e.g., selected from ornithine, β-alanine, GABA, δ-Aminolevulinic acid, PABA, a D-amino acid (e.g., D-alanine or D-glutamate), aminoisobutyric acid, dehydroalanine, cystathionine, lanthionine, Djenkolic acid, Diaminopimelic acid, Homoalanine, Norvaline, Norleucine, Homonorleucine, homoserine, O-methyl-homoserine and O-ethyl-homoserine, ethionine, selenocysteine, selenohomocysteine, selenomethionine, selenoethionine, tellurocysteine, or telluromethionine) in the polypeptide, first polypeptide, or second polypeptide, e.g., whether at least 80, 85, 90, 95, 96, 97, 98, or 99% of the polypeptide, first polypeptide, or second polypeptide present contains one or more artificial, synthetic, or non-canonical amino acids;
[0560] (xi) the stability of the polypeptide, first polypeptide, or second polypeptide (e.g., over time and/or under a pre-selected condition), e.g., whether at least 80, 85, 90, 95, 96, 97, 98, or 99% of the polypeptide, first polypeptide, or second polypeptide remains intact (e.g., greater than 600, 650, 700, 750, 800, 850, 900, 950, 1000, 1050, 1100, 1150, 1200, 1250, 1300, 1350, 1400, 1450, 1500, 1600, 1700, 1800, 1900, or 2000 amino acids long (and optionally, no larger than 2500, 2000, 1500, 1400, 1300, 1200, 1100, 1000, 900, 800, 700, or 600 amino acids long)) after a stability test;
[0561] (xii) the potency of the polypeptide, first polypeptide, or second polypeptide in a system for modifying DNA, e.g., whether at least 1% of target sites are modified after a system comprising the polypeptide, first polypeptide, or second polypeptide is assayed for potency; or
[0562] (xiii) the presence, absence, and/or level of one or more of a pyrogen, virus, fungus, bacterial pathogen, or host cell protein, e.g., whether the system is free or substantially free of pyrogen, virus, fungus, bacterial pathogen, or host cell protein contamination.

[0563] In some embodiments, a system or pharmaceutical composition described herein is endotoxin free.

[0564] In some embodiments, the presence, absence, and/or level of one or more of a pyrogen, virus, fungus, bacterial pathogen, and/or host cell protein is determined. In embodiments, whether the system is free or substantially free of pyrogen, virus, fungus, bacterial pathogen, and/or host cell protein contamination is determined.

[0565] In some embodiments, a pharmaceutical composition or system as described herein has one or more (e.g., 1, 2, 3, or 4) of the following characteristics:
[0566] (a) less than 1% (e.g., less than 0.5%, 0.4%, 0.3%, 0.2%, or 0.1%) DNA template relative to the template RNA and/or the RNA encoding the polypeptide, e.g., on a molar basis;
[0567] (b) less than 1% (e.g., less than 0.5%, 0.4%, 0.3%, 0.2%, or 0.1%) uncapped RNA relative to the template RNA and/or the RNA encoding the polypeptide, e.g., on a molar basis;
[0568] (c) less than 1% (e.g., less than 0.5%, 0.4%, 0.3%, 0.2%, or 0.1%) partial length RNAs relative to the template RNA and/or the RNA encoding the polypeptide, e.g., on a molar basis;
[0569] (d) substantially lacks unreacted cap dinucleotides.

### Regulation of System Components

[0570] It is highly desirable for a Gene Writer system of this invention to exhibit activity in target cells, while simultaneously having reduced activity in non-target cells. Thus, regulatory control of one or more components of the system is contemplated in preferred embodiments.

### Promoters and Enhancers:

[0571] In some embodiments, a nucleic acid described herein (e.g., a nucleic acid encoding a Gene Writer polypeptide, Template RNA, or an open reading frame in a heterologous object sequence) comprises a promoter sequence, e.g., a tissue specific promoter sequence. In some embodiments, the tissue-specific promoter is used to increase the target-cell specificity of a GeneWriter system. For instance, the promoter can be chosen on the basis that it is active in a target cell type but not active in (or active at a lower level in) a non-target cell type. Thus, a tissue-specific promoter used to drive expression of a nucleic acid encoding a Gene Writer polypeptide or Template RNA would result in reduced expression of the component in non-target cells, leading to a reduction in integration in non-target cells, as compared to target cells. In some embodiments, a tissue-specific promoter is used to drive expression of an open reading frame of a heterologous object sequence, such that even if heterologous object sequence integrated into the genome of a non-target cell, the promoter would not drive expression (or only drive low level expression) of the open reading frame.

[0572] In some embodiments, one or more promoter or enhancer elements are operably linked to a nucleic acid encoding a Gene Writer protein or a template nucleic acid, e.g., that controls expression of the heterologous object sequence. In certain embodiments, the one or more promoter or enhancer elements comprise cell-type or tissue specific elements. In some embodiments, the promoter or enhancer is the same or derived from the promoter or enhancer that naturally controls expression of the heterologous object sequence. For example, the ornithine transcarbomylase promoter and enhancer may be used to control expression of the ornithine transcarbomylase gene in a system or method provided by the invention for correcting ornithine transcarbomylase deficiencies. In some embodiments, the promoter is a promoter of Table 33 or a functional fragment or variant thereof.

[0573] Exemplary tissue specific promoters that are commercially available can be found, for example, at a uniform resource locator (e.g., https://www.invivogen.com/tissue-specific-promoters). In some embodiments, a promoter is a native promoter or a minimal promoter, e.g., which consists of a single fragment from the 5′ region of a given gene. In some embodiments, a native promoter comprises a core promoter and its natural 5′ UTR, In some embodiments, the 5′ UTR comprises an intron. In other embodiments, these include composite promoters, which combine promoter elements of different origins or were generated by assembling a distal enhancer with a minimal promoter of the same origin.

[0574] Exemplary cell or tissue specific promoters are provided in the tables, below, and exemplary nucleic acid sequences encoding them are known in the art and can be readily accessed using a variety of resources, such as the NCBI database, including RefSeq, as well as the Eukaryotic Promoter Database (//epd.epfl.ch//index.php).

TABLE 33
Exemplary cell or tissue-specific promoters

| Promoter | Target cells |
|---|---|
| B29 Promoter | B cells |
| CD14 Promoter | Monocytic Cells |
| CD43 Promoter | Leukocytes and platelets |
| CD45 Promoter | Hematopoeitic cells |
| CD68 promoter | macrophages |
| Desmin promoter | muscle cells |
| Elastase-1 promoter | pancreatic acinar cells |
| Endoglin promoter | endothelial cells |
| fibronectin promoter | differentiating cells, healing tissue |
| Flt-1 promoter | endothelial cells |
| GFAP promoter | Astrocytes |
| GPIIB promoter | megakaryocytes |
| ICAM-2 Promoter | Endothelial cells |
| INF-Beta promoter | Hematopoeitic cells |
| Mb promoter | muscle cells |
| Nphs1 promoter | podocytes |
| OG-2 promoter | Osteoblasts, Odonblasts |
| SP-B promoter | Lung |
| Syn1 promoter | Neurons |
| WASP promoter | Hematopoeitic cells |
| SV40/bAlb promoter | Liver |
| SV40/bAlb promoter | Liver |
| SV40/Cd3 promoter | Leukocytes and platelets |
| SV40/CD45 promoter | hematopoeitic cells |
| NSE/RU5′ promoter | Mature Neurons |

TABLE 34
Additional exemplary cell or tissue-specific promoters

| Promoter | Gene Description | Gene Specificity |
|---|---|---|
| APOA2 | Apolipoprotein A-II | Hepatocytes (from hepatocyte progenitors) |
| SERPINA 1 (hAAT) | Serpin peptidase inhibitor, clade A (alpha-1 antiproteinase, | Hepatocytes (from definitive endoderm stage) |
| | antitrypsin), member 1 (also named alpha 1 anti-tryps in) | |
| CYP3A | Cytochrome P450, family 3, subfamily A, polypeptide | Mature Hepatocytes |
| MIR122 | MicroRNA 122 | Hepatocytes (from early stage embryonic liver cells) |
| | | and endoderm |

Pancreatic specific promoters

| | | |
|---|---|---|
| INS | Insulin | Pancreatic beta cells (from definitive endoderm stage) |
| IRS2 | Insulin receptor substrate 2 | Pancreatic beta cells |
| Pdx1 | Pancreatic and duodenal homeobox 1 | Pancreas (from definitive endoderm stage) |
| Alx3 | Aristaless-like homeobox 3 | Pancreatic beta cells (from definitive endoderm stage) |
| Ppy | Pancreatic polypeptide | PP pancreatic cells (gamma cells) |

Cardiac specific promoters

| | | |
|---|---|---|
| Myh6 (aMHC) | Myosin, heavy chain 6, cardiac muscle, alpha | Late differentiation marker of cardiac muscle cells |
| | | (atrial specificity) |
| MYL2 (MLC-2v) | Myosin, light chain 2, regulatory, cardiac, slow | Late differentiation marker of cardiac muscle cells |
| | | (ventricular specificity) |
| NPPA (ANF) | Natriuretic peptide precursor A (also named Atrial | Atrial specificity in adult cells |
| | Natriuretic Factor) | |
| Slc8a1 (Ncx1) | Solute carrier family 8 (sodium/calcium exchanger), | Cardiomyocytes from early developmental stages |
| | member 1 | |

CNS specific promoters

| | | |
|---|---|---|
| SYN1 (hSyn) | Synapsin I | Neurons |
| GFAP | Glial fibrillary acidic protein | Astrocytes |
| INA | Internexin neuronal intermediate filament protein, | Neuroprogenitors |
| | alpha (a-internexin) | |
| NES | Nestin | Neuroprogenitors and ectoderm |
| MOBP | Myelin-associated oligodendrocyte basic protein | Oligodendrocytes |
| MBP | Myelin basic protein | Oligodendrocytes |
| TH | Tyrosine hydroxylase | Dopaminergic neurons |
| FOXA2 (HNF3 beta) | Forkhead box A2 | Dopaminergic neurons (also used as a marker of endoderm) |

Skin specific promoters

| | | |
|---|---|---|
| FLG | Filaggrin | Keratinocytes from granular layer |
| TGM3 | Transglutaminase 3 | Keratinocytes from granular layer |

Immune cell specific promoters
Urogential cell specific promoters

| | | |
|---|---|---|
| Pbsn | Probasin | Prostatic epithelium |
| Upk2 | Uroplakin 2 | Bladder |
| Sbp | Spermine binding protein | Prostate |
| Fer114 | Fer-1-like 4 | Bladder |

Endothelial cell specific promoters

| | | |
|---|---|---|
| ENG | Endoglin | Endothelial cells |

Pluripotent and embryonic cell specific promoters

| | | |
|---|---|---|
| Synthetic Oct4 | Synthetic promoter based on a Oct-4 core enhancer element | Pluripotent cells (ES cells, iPS cells) |
| T brachyury | Brachyury | Mesoderm |
| NES | Nestin | Neuroprogenitors and Ectoderm |
| SOX17 | SRY (sex determining region Y)-box 17 | Endoderm |
| FOXA2 (HNFJ beta) | Forkhead box A2 | Endoderm (also used as a marker of dopaminergic neurons) |

[0575] Depending on the host/vector system utilized, any of a number of suitable transcription and translation control elements, including constitutive and inducible promoters, transcription enhancer elements, transcription terminators, etc. may be used in the expression vector (see e.g., Bitter et al. (1987) Methods in Enzymology, 153:516-544: incorporated herein by reference in its entirety).

[0576] In some embodiments, a nucleic acid encoding a Gene Writer or template nucleic acid is operably linked to a control element, e.g., a transcriptional control element, such as a promoter. The transcriptional control element may, in some embodiment, be functional in either a eukaryotic cell, e.g., a mammalian cell; or a prokaryotic cell (e.g., bacterial or archaeal cell). In some embodiments, a nucleotide sequence encoding a polypeptide is operably linked to multiple control elements, e.g., that allow expression of the nucleotide sequence encoding the polypeptide in both prokaryotic and eukaryotic cells.

[0577] For illustration purposes, examples of spatially restricted promoters include, but are not limited to, neuron-specific promoters, adipocyte-specific promoters, cardiomyocyte-specific promoters, smooth muscle-specific promoters, photoreceptor-specific promoters, etc. Neuron-specific spatially restricted promoters include, but are not limited to, a neuron-specific enolase (NSE) promoter (see, e.g., EMBL HSENO2, X51956); an aromatic amino acid decarboxylase (AADC) promoter, a neurofilament promoter (see, e.g., GenBank HUMNFL, L04147), a synapsin promoter (see, e g., GenBank HUMSYNIB, M55301); a thy-1 promoter (see, e.g., Chen et al. (1987) Cell 51:7-19: and Llewellyn, et al. (2010) Nat. Med. 16(10):1161-1166); a serotonin receptor promoter (see, e g., GenBank S62283); a tyrosine hydroxylase promoter (TH) (see, e.g., Oh et al. (2009) Gene Ther 16:437; Sasaoka et al. (1992) Mol. Brain Res. 16:274: Boundy et al (1998) J. Neurosci. 18:9989; and Kaneda et al. (1991) Neuron 6:583-594); a GnRH promoter (see, e.g., Radovick et al. (1991) Proc. Natd. Acad. Sci. USA 88:3402-3406); an L7 promoter (see, e.g., Oberdick et al. (1990) Science 248.223-226); a DNMT promoter (see, e.g., Bartge et al. (1988) Proc. Natl. Acad. Sci. USA 85:3648-3652); an enkephalin promoter (see, e.g., Comb et al. (1988) EMBO J. 17:3793-3805): a myelin basic protein (MBP) promoter; a Ca2+-calmodulin-dependent protein kinase II-alpha (CamKIIα) promoter (see, e.g., Mayford et al. (1996) Proc. Natl. Acad. Sci. USA 93:13250; and Casanova et al (2001) Genesis 31:37); a CMV enhancer/platelet-derived growth factor-β promoter (see, e.g., Liu et al. (2004) Gene Therapy 11:52-60); and the like.

[0578] Adipocyte-specific spatially restricted promoters include, but are not limited to, the aP2 gene promoter/enhancer. e.g., a region from −5.4 kb to +21 bp of a human aP2 gene (see, e.g., Tozzo et al. (1997) Endocrinol. 381604; Ross et al. (1990) Proc. Natd. Acad. Sci USA 87:9590; and Pavjani et al. (2005) Nat. Med. 11:797); a glucose transporter-4 (GLUT4) promoter (see, e g., Knight et al. (2003) Proc. Natl. Acad. Sci. USA 100.14725); a fatty acid translocase (FAT/CD36) promoter (see, e.g., Kuriki et al. (2002) Biol. Pharm. Bull. 25:1476; and Sato et al. (2002) J Biol Chem 277.15703); a stearoyl-CoA desaturase-1 (SCD1) promoter (Tabor et al. (1999) J. Biol. Chem. 274:20603); a leptin promoter (see, e.g., Mason et al. (1998) Endocrinol. 139:1013, and Chen et al. (1999) Biochem. Biophys. Res. Comm. 262:187); an adiponectin promoter (see, e.g., Kita et al. (2005) Biochem. Biophys. Res Comm. 331:484; and Chakrabarti (2010) Endocrinol. 151:2408); an adipsin promoter (see, e.g., Platt et al. (1989) Proc. Natl. Acad. Sci. USA 86:7490); a resistin promoter (see, e g., Seo et al. (2003) Molec Endocrinol 17.1522); and the like.

[0579] Cardiomyocyte-specific spatially restricted promoters include, but are not limited to, control sequences derived from the following genes: myosin light chain-2, α-myosin heavy chain, AE3, cardiac troponin C, cardiac actin, and the like. Franz et al (1997) Cardiovasc. Res. 35:560-566; Robbins et al. (1995) Ann. N.Y. Acad. Sci. 752:492-505; Linn et al. (1995) Circ. Res. 76:584-591; Parmacek et al. (1994) Mol. Cell. Biol. 14:1870-1885; Hunter et al. (1993) Hypertension 22.608-617; and Sartorelli et al. (1992) Proc Natl Acad. Sci. USA 89:4047-4051.

[0580] Smooth muscle-specific spatially restricted promoters include, but are not limited to, an SM22α promoter (see, e g., Akyurek et al. (2000) Mol. Med. 6:983; and U.S. Pat. No. 7,169,874); a smoothelin promoter (see, e.g., WO 2001/018048); an α-smooth muscle actin promoter; and the like. For example, a 0.4 kb region of the SM22α promoter, within which lie two CArG elements, has been shown to mediate vascular smooth muscle cell-specific expression (see, e.g., Kim, et al. (1997) Mol. Cell Biol. 17, 2266-2278, Li, et al., (1996) J. Cell Biol. 132, 849-859; and Moessler, et al. (1996) Development 122, 2415-2425).

[0581] Photoreceptor-specific spatially restricted promoters include, but are not limited to, a rhodopsin promoter, a rhodopsin kinase promoter (Young et al (2003) Ophthalmol Vis. Sci 44:4076); a beta phosphodiesterase gene promoter (Nicoud et al. (2007) J. Gene Med. 9:1015); a retinitis pigmentosa gene promoter (Nicoud et al (2007) supra); an interphotoreceptor retinoid-binding protein (IRBP) gene enhancer (Nicoud et al. (2007) supra); an IRBP gene promoter (Yokoyama et al. (1992) Exp Eye Res. 55:225); and the like.

[0582] Cell-specific promoters known in the art may be used to direct expression of a Gene Writer protein, e.g., as described herein. Nonlimiting exemplary mammalian cell-specific promoters have been characterized and used in mice expressing Cre recombinase in a cell-specific manner. Certain nonlimiting exemplary mammalian cell-specific promoters are listed in Table 1 of U.S. Pat. No. 9,845,481, incorporated herein by reference.

[0583] In some embodiments, a cell-specific promoters is a promoter that is active in plants. Many exemplary cell-specific plant promoters are known in the art See, e g., U.S. Pat. Nos. 5,097,025; 5,783,393; 5,880,330; 5,981,727; 7,557,264; 6,291,666; 7,132,526; and 7,323,622; and U.S. Publication Nos. 2010/0269226; 2007/0180580, 2005/0034192: and 2005/0086712, which are incorporated by reference herein in their entireties for any purpose.

[0584] In some embodiments, a vector as described herein comprises an expression cassette. The term “expression cassette”, as used herein, refers to a nucleic acid construct comprising nucleic acid elements sufficient for the expression of the nucleic acid molecule of the instant invention. Typically, an expression cassette comprises the nucleic acid molecule of the instant invention operatively linked to a promoter sequence. The term“operatively linked” refers to the association of two or more nucleic acid fragments on a single nucleic acid fragment so that the function of one is affected by the other. For example, a promoter is operatively linked with a coding sequence when it is capable of affecting the expression of that coding sequence (e g., the coding sequence is under the transcriptional control of the promoter). Encoding sequences can be operatively linked to regulatory sequences in sense or antisense orientation. In certain embodiments, the promoter is a heterologous promoter. The term“heterologous promoter”, as used herein, refers to a promoter that is not found to be operatively linked to a given encoding sequence in nature. In certain embodiments, an expression cassette may comprise additional elements, for example, an intron, an enhancer, a polyadenylation site, a woodchuck response element (WRE), and/or other elements known to affect expression levels of the encoding sequenceA“promoter” typically controls the expression of a coding sequence or functional RNA. In certain embodiments, a promoter sequence comprises proximal and more distal upstream elements and can further comprise an enhancer element. An “enhancer” can typically stimulate promoter activity and may be an innate element of the promoter or a heterologous element inserted to enhance the level or tissue-specificity of a promoter. In certain embodiments, the promoter is derived in its entirety from a native gene. In certain embodiments, the promoter is composed of different elements derived from different naturally occurring promoters. In certain embodiments, the promoter comprises a synthetic nucleotide sequence. It will be understood by those skilled in the art that different promoters will direct the expression of a gene in different tissues or cell types, or at different stages of development, or in response to different environmental conditions or to the presence or the absence of a drug or transcriptional co-factor. Ubiquitous, cell-type-specific, tissue-specific, developmental stage-specific, and conditional promoters, for example, drug-responsive promoters (e.g., tetracycline-responsive promoters) are well known to those of skill in the art. Examples of promoter include, but are not limited to, the phosphoglycerate kinase (PKG) promoter, CAG (composite of the CMV enhancer the chicken beta actin promoter (CBA) and the rabbit beta globin intron.), NSE (neuronal specific enolase), synapsin or NeuN promoters, the SV40 early promoter, mouse mammary tumor virus LTR promoter; adenovirus major late promoter (Ad MLP); a herpes simplex virus (HSV) promoter, a cytomegalovirus (CMV) promoter such as the CMV immediate early promoter region (CMVIE), SFFV promoter, rous sarcoma virus (RSV) promoter, synthetic promoters, hybrid promoters, and the like. Other promoters can be of human origin or from other species, including from mice. Common promoters include, e.g., the human cytomegalovirus (CMV) immediate early gene promoter, the SV40 early promoter, the Rous sarcoma virus long terminal repeat, [beta]-actin, rat insulin promoter, the phosphoglycerate kinase promoter, the human alpha-1 antitrypsin (hAAT) promoter, the transthyretin promoter, the TBG promoter and other liver-specific promoters, the desmin promoter and similar muscle-specific promoters, the EF1-alpha promoter, the CAG promoter and other constitutive promoters, hybrid promoters with multi-tissue specificity, promoters specific for neurons like synapsin and glyceraldehyde-3-phosphate dehydrogenase promoter, all of which are promoters well known and readily available to those of skill in the art, can be used to obtain high-level expression of the coding sequence of interest. In addition, sequences derived from non-viral genes, such as the murine metallothionein gene, will also find use herein. Such promoter sequences are commercially available from, e.g., Stratagene (San Diego, CA). Additional exemplary promoter sequences are described, for example, in WO2018213786A1 (incorporated by reference herein in its entirety).

[0585] In some embodiments, the apolipoprotein E enhancer (ApoE) or a functional fragment thereof is used, e.g., to drive expression in the liver. In some embodiments, two copies of the ApoE enhancer or a functional fragment thereof is used. In some embodiments, the ApoE enhancer or functional fragment thereof is used in combination with a promoter, e.g., the human alpha-1 antitrypsin (hAAT) promoter.

[0586] In some embodiments, the regulatory sequences impart tissue-specific gene expression capabilities in some cases, the tissue-specific regulatory sequences bind tissue-specific transcription factors that induce transcription in a tissue specific manner. Various tissue-specific regulatory sequences (e g., promoters, enhancers, etc.) are known in the art. Exemplary tissue-specific regulatory sequences include, but are not limited to, the following tissue-specific promoters: a liver-specific thyroxin binding globulin (TBG) promoter, a insulin promoter, a glucagon promoter, a somatostatin promoter, a pancreatic polypeptide (PPY) promoter, a synapsin-1 (Syn) promoter, a creatine kinase (MCK) promoter, a mammalian desmin (DES) promoter, a α-myosin heavy chain (a-MHC) promoter, or a cardiac Troponin T (cTnT) promoter. Other exemplary promoters include Beta-actin promoter, hepatitis B virus core promoter, Sandig et al., Gene Ther., 3:1002-9 (1996): alpha-fetoprotein (AFP) promoter, Arbuthnot et al., Hum. Gene Ther., 7:1503-14 (1996)), bone osteocalcin promoter (Stein et al., Mol. Biol. Rep., 24:185-96 (1997)); bone sialoprotein promoter (Chen et al., J. Bone Miner. Res., 11:654-64 (1996)), CD2 promoter (Hansal et al., J. Immunol., 161:1063-8 (1998); immunoglobulin heavy chain promoter; T cell receptor α-chain promoter, neuronal such as neuron-specific enolase (NSE) promoter (Andersen et al., Cell. Mol. Neurobiol., 13:503-15 (1993)), neurofilament light-chain gene promoter (Piccioli et al., Proc. Natl. Acad. Sci. USA, 88:5611-5 (1991)), and the neuron-specific vgf gene promoter (Piccioli et al., Neuron, 5.373-84 (1995)), and others. Additional exemplary promoter sequences are described, for example, in U.S. patent Ser. No. 10/300,146 (incorporated herein by reference in its entirety). In some embodiments, a tissue-specific regulatory element, e.g., a tissue-specific promoter, is selected from one known to be operably linked to a gene that is highly expressed in a given tissue, e.g., as measured by RNA-seq or protein expression data, or a combination thereof. Methods for analyzing tissue specificity by expression are taught in Fagerberg et al. Mol Cell Proteomics 13(2):397-406 (2014), which is incorporated herein by reference in its entirety.

[0587] In some embodiments, a vector described herein is a multicistronic expression construct. Multicistronic expression constructs include, for example, constructs harboring a first expression cassette, e.g. comprising a first promoter and a first encoding nucleic acid sequence, and a second expression cassette, e.g. comprising a second promoter and a second encoding nucleic acid sequence. Such multicistronic expression constructs may, in some instances, be particularly useful in the delivery of non-translated gene products, such as hairpin RNAs, together with a polypeptide, for example, a Gene Writer polypeptide and Gene Writer template. In some embodiments, multicistronic expression constructs may exhibit reduced expression levels of one or more of the included transgenes, for example, because of promoter interference or the presence of incompatible nucleic acid elements in close proximity. If a multicistronic expression construct is part of a viral vector, the presence of a self-complementary nucleic acid sequence may, in some instances, interfere with the formation of structures necessary for viral reproduction or packaging.

[0588] In some embodiments, the sequence encodes an RNA with a hairpin. In some embodiments, the hairpin RNA is a guide RNA, a template RNA, shRNA, or a microRNA. In some embodiments, the first promoter is an RNA polymerase I promoter. In some embodiments, the first promoter is an RNA polymerase 11 promoter. In some embodiments, the second promoter is an RNA polymerase III promoter. In some embodiments, the second promoter is a U6 or H1 promoter. In some embodiments, the nucleic acid construct comprises the structure of AAV construct B1 or B2.

[0589] Without wishing to be bound by theory, multicistronic expression constructs may not achieve optimal expression levels as compared to expression systems containing only one cistron One of the suggested causes of lower expression levels achieved with multicistronic expression constructs comprising two or more promoter elements is the phenomenon of promoter interference (see, e.g., Curtin J A, Dane A P, Swanson A, Alexander i E, Ginn S L. Bidirectional promoter interference between two widely used internal heterologous promoters in a late-generation lentiviral construct. Gene Ther. 2008 March; 15(5):384-90: and Martin-Duque P, Jezzard S, Kaftansis L, Vassaux G. Direct comparison of the insulating properties of two genetic elements in an adenoviral vector containing two different expression cassettes. Hum Gene Ther. 2004 October; 15(10):995-1002; both references incorporated herein by reference for disclosure of promoter interference phenomenon). In some embodiments, the problem of promoter interference may be overcome, e.g., by producing multicistronic expression constructs comprising only one promoter driving transcription of multiple encoding nucleic acid sequences separated by internal ribosomal entry sites, or by separating cistrons comprising their own promoter with transcriptional insulator elements. In some embodiments, single-promoter driven expression of multiple cistrons may result in uneven expression levels of the cistrons. In some embodiments, a promoter cannot efficiently be isolated and isolation elements may not be compatible with some gene transfer vectors, for example, some retroviral vectors.

[0590] miRNAs, Inhibitors, and miRNA Binding Sites:

[0591] miRNAs and other small interfering nucleic acids generally regulate gene expression via target RNA transcript cleavage/degradation or translational repression of the target messenger RNA (mRNA). miRNAs may, in some instances, be natively expressed, typically as final 19-25 non-translated RNA products. miRNAs generally exhibit their activity through sequence-specific interactions with the 3′ untranslated regions (UTR) of target mRNAs. These endogenously expressed miRNAs may form hairpin precursors that are subsequently processed into an miRNA duplex, and further into a mature single stranded miRNA molecule. This mature miRNA generally guides a multiprotein complex, miRISC, which identifies target 3′ UTR regions of target mRNAs based upon their complementarity to the mature miRNA. Useful transgene products may include, for example, miRNAs or miRNA binding sites that regulate the expression of a linked polypeptide. A non-limiting list of miRNA genes; the products of these genes and their homologues are useful as transgenes or as targets for small interfering nucleic acids (e.g., miRNA sponges, antisense oligonucleotides), e.g., in methods such as those listed in U.S. Ser. No. 10/300,146, 22.25-25:48, incorporated by reference. In some embodiments, one or more binding sites for one or more of the foregoing miRNAs are incorporated in a transgene, e.g., a transgene delivered by a rAAV vector, e.g., to inhibit the expression of the transgene in one or more tissues of an animal harboring the transgene. In some embodiments, a binding site may be selected to control the expression of a trangene in a tissue specific manner. For example, binding sites for the liver-specific miR-122 may be incorporated into a transgene to inhibit expression of that transgene in the liver. Additional exemplary miRNA sequences are described, for example, in U.S. patent Ser. No. 10/300,146 (incorporated herein by reference in its entirety). For liver-specific Gene Writing, however, overexpression of miR-122 may be utilized instead of using binding sites to effect miR-122-specific degradation. This miRNA is positively associated with hepatic differentiation and maturation, as well as enhanced expression of liver specific genes. Thus, in some embodiments, the coding sequence for miR-122 may be added to a component of a Gene Writing system to enhance a liver-directed therapy.

[0592] A miR inhibitor or miRNA inhibitor is generally an agent that blocks miRNA expression and/or processing. Examples of such agents include, but are not limited to, microRNA antagonists, microRNA specific antisense, microRNA sponges, and microRNA oligonucleotides (double-stranded, hairpin, short oligonucleotides) that inhibit miRNA interaction with a Drosha complex. MicroRNA inhibitors, e.g., miRNA sponges, can be expressed in cells from transgenes (e.g., as described in Ebert, M S. Nature Methods, Epub Aug. 12, 2007; incorporated by reference herein in its entirety). In some embodiments, microRNA sponges, or other miR inhibitors, are used with the AAVs. microRNA sponges generally specifically inhibit miRNAs through a complementary heptameric seed sequence. In some embodiments, an entire family of miRNAs can be silenced using a single sponge sequence. Other methods for silencing miRNA function (derepression of miRNA targets) in cells will be apparent to one of ordinary skill in the art.

[0593] In some embodiments, a miRNA as described herein comprises a sequence listed in Table 4 of PCT Publication No. WO2020014209, incorporated herein by reference. Also incorporated herein by reference are the listing of exemplary miRNA sequences from WO2020014209.

[0594] In some embodiments, it is advantageous to silence one or more components of a Gene Writing system (e.g., mRNA encoding a Gene Writer polypeptide, a Gene Writer Template RNA, or a heterologous object sequence expressed from the genome after successful Gene Writing) in a portion of cells. In some embodiments, it is advantageous to restrict expression of a component of a Gene Writing system to select cell types within a tissue of interest.

[0595] For example, it is known that in a given tissue, e.g., liver, macrophages and immune cells, e.g., Kupffer cells in the liver, may engage in uptake of a delivery vehicle for one or more components of a Gene Writing system. In some embodiments, at least one binding site for at least one miRNA highly expressed in macrophages and immune cells, e.g., Kupffer cells, is included in at least one component of a Gene Writing system, e.g., nucleic acid encoding a Gene Writing polypeptide or a transgene. In some embodiments, a miRNA that targets the one or more binding sites is listed in a table referenced herein, e.g., miR-142, e.g., mature miRNA hsa-miR-142-5p or hsa-miR-142-3p.

[0596] In some embodiments, there may be a benefit to decreasing Gene Writer levels and/or Gene Writer activity in cells in which Gene Writer expression or overexpression of a transgene may have a toxic effect. For example, it has been shown that delivery of a transgene overexpression cassette to dorsal root ganglion neurons may result in toxicity of a gene therapy (see Hordeaux et al Sci Transl Med 12(569):eaba9188 (2020), incorporated herein by reference in its entirety). In some embodiments, at least one miRNA binding site may be incorporated into a nucleic acid component of a Gene Writing system to reduce expression of a system component in a neuron, e.g., a dorsal root ganglion neuron. In some embodiments, the at least one miRNA binding site incorporated into a nucleic acid component of a Gene Writing system to reduce expression of a system component in a neuron is a binding site of miR-182, e.g., mature miRNA hsa-miR-182-5p or hsa-miR-182-3p. In some embodiments, the at least one miRNA binding site incorporated into a nucleic acid component of a Gene Writing system to reduce expression of a system component in a neuron is a binding site of miR-183, e.g., mature miRNA hsa-miR-183-5p or hsa-miR-183-3p. In some embodiments, combinations of miRNA binding sites may be used to enhance the restriction of expression of one or more components of a Gene Writing system to a tissue or cell type of interest.

[0597] Table A5 below provides exemplary miRNAs and corresponding expressing cells, e.g., a miRNA for which one can, in some embodiments, incorporate binding sites (complementary sequences) in the transgene or polypeptide nucleic acid, e.g., to decrease expression in that off-target cell.

TABLE A5
Exemplary miRNA from off-target cells and tissues

| | miRNA | | | |
|---|---|---|---|---|
| Silenced cell type | name | Mature miRNA | miRNA sequence | SEQ ID NO: |
| Kupffer cells | miR-142 | hsa-miR-142-5p | cauaaaguagaaagcacuacu | 134 |
| Kupffer cells | miR-142 | hsa-miR-142-3p | uguaguguuuccuacuuuaugga | 135 |
| Dorsal root | miR-182 | hsa-miR-182-5p | uuuggcaaugguagaacucacacu | 136 |
| ganglion neurons | | | | |
| Dorsal root | miR-182 | hsa-miR-182-3p | ugguucuagacuugccaacua | 137 |
| ganglion neurons | | | | |
| Dorsal root | miR-183 | hsa-miR-183-5p | uauggcacugguagaauucacu | 138 |
| ganglion neurons | | | | |
| Table XDorsal | miR-183 | hsa-miR-183-3p | gugaauuaccgaagggccauaa | 139 |
| root ganglion | | | | |
| neurons | | | | |
| Hepatocytes | miR-122 | hsa-miR-122-5p | uggagugugacaaugguguuug | 140 |
| Hepatocytes | miR-122 | hsa-miR-122-3p | aacgccauuaucacacuaaaua | 141 |

[0598] In some embodiments, a nucleic acid described herein (e.g., a nucleic acid encoding a Gene Writer polypeptide, Gene Writer Template, and/or an open reading frame in a heterologous object sequence) comprises at least one microRNA binding site. In some embodiments, the microRNA binding site is used to increase the target-cell specificity of a Gene Writer system. For instance, the microRNA binding site can be chosen on the basis that it is recognized by a miRNA that is present in a non-target cell type, but that is not present (or is present at a reduced level relative to the non-target cell) in a target cell type. Thus, when the RNA (e.g., the RNA encoding a Gene Writer polypeptide, Gene Writer Template, and/or transcript from an open reading frame in a heterologous object sequence) is present in a non-target cell, it would be bound by the miRNA, and when the RNA (e.g., the RNA encoding a Gene Writer polypeptide, Gene Writer Template, and/or transcript from an open reading frame in a heterologous object sequence) is present in a target cell, it would not be bound by the miRNA (or bound but at reduced levels relative to the non-target cell). While not wishing to be bound by theory, binding of the miRNA to an RNA of the system (e.g., the RNA encoding a Gene Writer polypeptide, Gene Writer Template, and/or transcript from an open reading frame in a heterologous object sequence) may result in destabilization or degradation of the RNA molecule or interference with translation of a coding RNA. Accordingly, the heterologous object sequence would be inserted into the genome of target cells more efficiently than into the genome of non-target cells. It is contemplated that incorporation of one or more appropriate miRNA binding sites into a nucleic acid encoding the Gene Writer polypeptide or Template RNA would thus reduce integration in off-target cells, while incorporation into a heterologous object sequence would reduce expression of a transgene in off-target cells. A system having a microRNA binding site in a nucleic acid would be expected to exhibit increased specificity for target cells by the addition of more miRNA binding sites on the same or on an additional nucleic acid component of the system. In some embodiments, one or more component of a Gene Writing system comprises one or more miRNA binding sites to reduce activity in off-target cells.

[0599] In some embodiments, a system comprising one or more tissue-specific promoter sequences may be used in combination with one or more microRNA binding sites, e.g., as described herein. When used in combination, it is contemplated that the one or more tissue-specific promoters would drive lower transcription of operably linked open reading frames, while one or more miRNA binding sites would simultaneously reduce the stability and/or translation of the comprising transcripts, leading to highly reduced activity of a Gene Writer system in one or more non-target cells.

[0600] In some embodiments, a heterologous object sequence comprised by a template RNA (or DNA encoding the template RNA) is operably linked to at least one regulatory sequence. In some embodiments, the heterologous object sequence is operably linked to a tissue-specific promoter, such that expression of the heterologous object sequence, e.g., a therapeutic protein, is upregulated in target cells, as above. In some embodiments, the heterologous object sequence is operably linked to a miRNA binding site, such that expression of the heterologous object sequence, e.g., a therapeutic protein, is downregulated in cells with higher levels of the corresponding miRNA, e.g., non-target cells, as above.

### Small Molecule Regulation

[0601] In some embodiments a polypeptide described herein (e.g., a Gene Writer polypeptide, or a domain or variant thereof) is controllable via a small molecule. In some embodiments the polypeptide is dimerized via a small molecule.

[0602] In some embodiment, the polypeptide is controllable via Chemical Induction of Dimerization (CID) with small molecules. CID is generally used to generate switches of protein function to alter cell physiology. An exemplary high specificity, efficient dimerizer is rimiducid (AP1903), which has two identical, protein-binding surfaces arranged tail-to-tail, each with high affinity and specificity for a mutant of FKBP12: FKBP12(F36V) (FKBP12v36, Fv36 or Fv), Attachment of one or more Fv domains onto one or more cell signaling molecules that normally rely on homodimerization can convert that protein to rimiducid control. Homodimerization with rimiducid is used in the context of an inducible caspase safety switch. This molecular switch that is controlled by a distinct dimerizer ligand, based on the heterodimerizing small molecule, rapamycin, or rapamycin analogs (“rapalogs”). Rapamycin binds to FKBP12, and its variants, and can induce heterodimerization of signaling domains that are fused to FKBP12 by binding to both FKBP12 and to polypeptides that contain the FKBP-rapamycin-binding (FRB) domain of mTOR. Provided in some embodiments of the present application are molecular switches that greatly augment the use of rapamycin, rapalogs and rimiducid as agents for therapeutic applications.

[0603] In some embodiments of the dual switch technology, a homodimerizer, such as AP1903 (rimiducid), directly induces dimerization or multimerization of polypeptides comprising an FKBP12 multimerizing region. In other embodiments, a polypeptide comprising an FKBP12 multimerization is multimerized, or aggregated by binding to a heterodimerizer, such as rapamycin or a rapalog, which also binds to an FRB or FRB variant multimerizing region on a chimeric polypeptide, also expressed in the modified cell, such as, for example, a chimeric antigen receptor. Rapamycin is a natural product macrolide that binds with high affinity (<1 nM) to FKBP12 and together initiates the high-affinity, inhibitory interaction with the FKBP-Rapamycin-Binding (FRB) domain of mTOR. FRB is small (89 amino acids) and can thereby be used as a protein “tag” or “handle” when appended to many proteins. Coexpression of a FRB-fused protein with a FKBP12-fused protein renders their approximation rapamycin-inducible (12-16). This can serve as the basis for a cell safety switch regulated by the orally available ligand, rapamycin, or derivatives of rapamycin (rapalogs) that do not inhibit mTOR at a low, therapeutic dose but instead bind with selected, Caspase-9-fused mutant FRB domains. (see Sabatini D N, et al., Cell. 1994; 78(1):35-43; Brown E J, et al., Nature. 1994; 369(6483):756-8; Chen J, et al., Proc Natl Acad Sci USA. 1995; 92(11):4947-51; and Choi J, Science. 1996; 273(5272):239-42).

[0604] In some embodiments, two levels of control are provided in the therapeutic cells. In embodiments, the first level of control may be tunable, i.e., the level of removal of the therapeutic cells may be controlled so that it results in partial removal of the therapeutic cells. In some embodiments, the chimeric antigen polypeptide comprises a binding site for rapamycin, or a rapamycin analog. In embodiments, also present in the therapeutic cell is a suicide gene, such as, for example, one encoding a caspase polypeptide. Using this controllable first level, the need for continued therapy may, in some embodiments, be balanced with the need to eliminate or reduce the level of negative side effects. In some embodiments, a rapamycin analog, a rapalog is administered to the patient, which then binds to both the caspase polypeptide and the chimeric antigen receptor, thus recruiting the caspase polypeptide to the location of the CAR, and aggregating the caspase polypeptide. Upon aggregation, the caspase polypeptide induces apoptosis. The amount of rapamycin or rapamycin analog administered to the patient may vary, if the removal of a lower level of cells by apoptosis is desired in order to reduce side effects and continue CAR therapy, a lower level of rapamycin or rapamycin may be administered to the patient. In some embodiments, the second level of control may be designed to achieve the maximum level of cell elimination. This second level may be based, for example, on the use of rimiducid, or AP1903. If there is a need to rapidly eliminate up to 100% of the therapeutic cells, the AP1903 may be administered to the patient. The multimeric AP1903 binds to the caspase polypeptide, leading to multimerization of the caspase polypeptide and apoptosis. In certain examples, second level may also be tunable, or controlled, by the level of AP1903 administered to the subject.

[0605] In certain embodiments, small molecules can be used to control genes, as described in for example, U.S. Ser. No. 10/584,351 at 47:53-56:47 (incorporated by reference herein in its entirety), together suitable ligands for the control features, e.g., in U.S. Ser. No. 10/584,351 at 56:48, et seq. as well as U10046049 at 43:27-52:20, incorporated by reference as well as the description of ligands for such control systems at 52:21, et seq.

### Modifications to Proteins of the System

### Subcellular Localization Signals:

[0606] In some embodiments, a polypeptide described herein (e.g., a Gene Writer polypeptide or a polypeptide encoded by a heterologous object sequence), comprises one or more (e.g., 2, 3, 4, 5) nuclear targeting sequences, for example, a nuclear localization sequence (NLS), e.g., as described above. In some embodiments, the NLS is a bipartite NLS. In some embodiments, an NLS facilitates the import of a protein comprising an NLS into the cell nucleus. In some embodiments, the NLS is fused to the N-terminus of a polypeptide described herein. In some embodiments, the NLS is fused to the C-terminus of a polypeptide described herein. In some embodiments, the NLS is fused to the N-terminus or the C-terminus of a polypeptide or domain described herein. In some embodiments, a linker sequence is disposed between the NLS and the neighboring domain of a polypeptide described herein, e.g., a Gene Writer polypeptide.

[0607] In some embodiments, an NLS comprises the amino acid sequence MDSLLMNRRKFLYQFKNVRWAKGRRETYLC (SEQ ID NO: 142), PKKRKVEGADKRTADGSEFESPKKKRKV (SEQ ID NO: 143), RKSGKIAAIWKRPRKPKKKRKV KRTADGSEFESPKKKRKV (SEQ ID NO: 144), KKTELQTTNAENKTKKL (SEQ ID NO: 145), or KRGINDRNFWRGENGRKTR (SEQ ID NO: 146), KRPAATKKAGQAKKKK (SEQ ID NO: 147), or a functional fragment or variant thereof. Exemplary NLS sequences are also described in PCT/EP2000/011690, the contents of which are incorporated herein by reference for their disclosure of exemplary nuclear localization sequences. In some embodiments, an NLS comprises an amino acid sequence as disclosed in Table 8. An NLS of this table may be utilized with one or more copies in a polypeptide in one or more locations in a polypeptide, e.g., 1, 2, 3 or more copies of an NLS in an N-terminal domain, between peptide domains, in a C-terminal domain, or in a combination of locations, in order to improve subcellular localization to the nucleus. Multiple unique sequences may be used within a single polypeptide. Sequences may be naturally monopartite or bipartite, e.g., having one or two stretches of basic amino acids, or may be used as chimeric bipartite sequences. Sequence references correspond to UniProt accession numbers, except where indicated as SeqNLS for sequences mined using a subcellular localization prediction algorithm (Lin et al BMC Bioinformat 13:157 (2012), incorporated herein by reference in its entirety).

TABLE 8
Exemplary nuclear localization signals for use in Gene Writing systems

| Sequence | Sequence References | SEQ ID NO: |
|---|---|---|
| AHFKISGEKRPSTDPGKKAK | Q76IQ7 | 148 |
| NPKKKKKKDP | | |
| AHRAKKMSKTHA | P21827 | 149 |
| ASPEYVNLPINGNG | SeqNLS | 150 |
| CTKRPRW | O88622, Q86W56, Q9QYM2, O02776 | 151 |
| DKAKRVSRNKSEKKRR | O15516, Q5RAK8, Q91YB2, Q91YB0, | 152 |
| | Q8QGQ6, O08785, Q9WVS9, Q6YGZ4 | |
| EELRLKEELLKGIYA | Q9QY16, Q9UHL0, Q2TBP1, Q9QY15 | 153 |
| EEQLRRRKNSRLNNTG | G5EFF5 | 154 |
| EVLKVIRTGKRKKKAWKR | SeqNLS | 155 |
| MVTKVC | | |
| HHHHHHHHHHHHQPH | Q63934, G3V7L5, Q12837 | 156 |
| HKKKHPDASVNFSEFSK | P10103, Q4R844, P12682, B0CM99, | 157 |
| | A9RA84, Q6YKA4, P09429, P63159, | |
| | Q08IE6, P63158, Q9YH06, B1MTB0 | |
| HKRTKK | Q2R2D5 | 158 |
| IINGRKLKLKKSRRRSSQTS | SeqNLS | 159 |
| NNSFTSRRS | | |
| KAEQERRK | Q8LH59 | 160 |
| KEKRKRREELFIEQKKRK | SeqNLS | 161 |
| KKGKDEWFSRGKKP | P30999 | 162 |
| KKGPSVQKRKKT | Q6ZN17 | 163 |
| KKKTVINDLLHYKKEK | SeqNLS, P32354 | 164 |
| KKNGGKGKNKPSAKIKK | SeqNLS | 165 |
| KKPKWDDFKKKKK | Q15397, Q8BKS9, Q562C7 | 166 |
| KKRKKD | SeqNLS, Q91Z62, Q1A730, Q969P5, | 167 |
| | Q2KHT6, Q9CPU7 | |
| KKRRKRRRK | SeqNLS | 168 |
| KKRRRRARK | Q9UMS6, D4A702, Q91YE8 | 169 |
| KKSKRGR | Q9UBS0 | 170 |
| KKSRKRGS | B4FG96 | 171 |
| KKSTALSRELGKIMRRR | SeqNLS, P32354 | 172 |
| KKSYQDPEIIAHSRPRK | Q9U7C9 | 173 |
| KKTGKNRKLKSKRVKTR | Q9Z301, O54943, Q8K3T2 | 174 |
| KKVSIAGQSGKLWRWKR | Q6YUL8 | 175 |
| KKYENVVIKRSPRKRGRPR | SeqNLS | 176 |
| K | | |
| KNKKRK | SeqNLS | 177 |
| KPKKKR | SeqNLS | 178 |
| KRAMKDDSHGNSTSPKRRK | Q0E671 | 179 |
| KRANSNLVAAYEKAKKK | P23508 | 180 |
| KRASEDTTSGSPPKKSSAGP | Q9BZZ5, Q5R644 | 181 |
| KR | | |
| KRFKRRWMVRKMKTKK | SeqNLS | 182 |
| KRGLNSSFETSPKKVK | Q8IV63 | 183 |
| KRGNSSIGPNDLSKRKQRK | SeqNLS | 184 |
| K | | |
| KRIHSVSLSQSQIDPSKKVK | SeqNLS | 185 |
| RAK | | |
| KRKGKLKNKGSKRKK | O15381 | 186 |
| KRRRRRRREKRKR | Q96GM8 | 187 |
| KRSNDRTYSPEEEKORRA | Q91ZF2 | 188 |
| KRTVATNGDASGAHRAKK | SeqNLS | 189 |
| MSK | | |
| KRVYNKGEDEQEHLPKGKK | SeqNLS | 190 |
| R | | |
| KSGKAPRRRAVSMDNSNK | Q9WVH4, O43524 | 191 |
| KVNFLDMSLDDIIIYKELE | Q9P127 | 192 |
| KVQHRIAKKTTRRRR | Q9DXE6 | 193 |
| LSPSLSPL | Q9Y261, P32182, P35583 | 194 |
| MDSLLMNRRKFLYQFKNVR | Q9GZX7 | 142 |
| WAKGRRETYLC | | |
| MPQNEYIELHRKRYGYRLD | SeqNLS | 195 |
| YHEKKRKKESREAHERSKK | | |
| AKKMIGLKAKLYHK | | |
| MVQLRPRASR | SeqNLS | 196 |
| NNKLLAKRRKGGASPKDDP | Q965G5 | 197 |
| MDDIK | | |
| NYKRPMDGTYGPPAKRHEG | O14497, A2BH40 | 198 |
| E | | |
| PDTKRAKLDSSETTMVKKK | SeqNLS | 199 |
| PEKRTKI | SegNLS | 200 |
| PGGRGKKK | Q719N1, Q9UBP0, A2VDN5 | 201 |
| PGKMDKGEHRQERRDRPY | Q01844, Q61545 | 202 |
| PKKGDKYDKTD | Q45FA5 | 203 |
| PKKKSRK | O35914, Q01954 | 204 |
| PKKNKPE | Q22663 | 205 |
| PKKRAKV | P04295, P89438 | 206 |
| PKPKKLKVE | P55263, P55262, P55264, Q64640 | 207 |
| PKRGRGR | Q9FYS5, Q43386 | 208 |
| PKRRLVDDA | P0C797 | 209 |
| PKRRRTY | SeqNLS | 210 |
| PLFKRR | A8X6H4, Q9TXJ0 | 211 |
| PLRKAKR | Q86WB0, Q5R8V9 | 212 |
| PPAKRKCIF | Q6AZ28, O75928, Q8C5D8 | 213 |
| PPARRRRL | Q8NAG6 | 214 |
| PPKKKRKV | Q3L6L5, P03070, P14999, P03071 | 215 |
| PPNKRMKVKH | Q8BN78 | 216 |
| PPRIYPQLPSAPT | P0C799 | 217 |
| PQRSPFPKSSVKR | SeqNLS | 218 |
| PRPRKVPR | P0C799 | 219 |
| PRRRVQRKR | SeqNLS, Q5R448, Q5TAQ9 | 220 |
| PRRVRLK | Q58DJ0, P56477, Q13568 | 221 |
| PSRKRPR | Q62315, Q5F363, Q92833 | 222 |
| PSSKKRKV | SeqNLS | 223 |
| PTKKRVK | P07664 | 224 |
| QRPGPYDRP | SeqNLS | 225 |
| RGKGGKGLGKGGAKRHRK | SeqNLS | 226 |
| RKAGKGGGGHKTTKKRSA | B4FG96 | 227 |
| KDEKVP | | |
| RKIKLKRAK | A1L3G9 | 228 |
| RKIKRKRAK | B9X187 | 229 |
| RKKEAPGPREELRSRGR | O35126, P54258, Q5IS70, P54259 | 230 |
| RKKRKGK | SeqNLS, Q29243, Q62165, Q28685, | 231 |
| | O18738, Q9TSZ6, Q14118 | |
| RKKRRQRRR | P04326, P69697, P69698, P05907, | 232 |
| | P20879, P04613, P19553, P0C1J9, | |
| | P20893, P12506, P04612, Q73370, | |
| | P0C1K0, P05906, P35965, P04609, | |
| | P04610, P04614, P04608, P05905 | |
| RKKSIPLSIKNLKRKHKRKK | Q9C0C9 | 233 |
| NKITR | | |
| RKLVKPKNTKMKTKLRTNP | Q14190 | 234 |
| Y | | |
| RKRLILSDKGQLDWKK | SeqNLS, Q91Z62, Q1A730, Q2KHT6, | 235 |
| | Q9CPU7 | |
| RKRLKSK | Q13309 | 236 |
| RKRRVRDNM | Q8QPH4, Q809M7, A8C8X1, Q2VNC5, | 237 |
| | Q38SQ0, 089749, Q6DNQ9, Q809L9, | |
| | Q0A429, Q20NV3, P16509, P16505, | |
| | Q6DNQ5, P16506, Q6XT06, P26118, | |
| | Q2ICQ2, Q2RCG8, Q0A2D0, Q0A2H9, | |
| | Q9IQ46, Q809M3, Q6J847, Q6J856, | |
| | B4URE4, A4GCM7, Q0A440, P26120, | |
| | P16511, | |
| RKRSPKDKKEKDLDGAGKR | Q7RTP6 | 238 |
| RKT | | |
| RKRTPRVDGQTGENDMNK | O94851 | 239 |
| RRRK | | |
| RLPVRRRRRR | P04499, P12541, P03269, P48313, | 240 |
| | P03270 | |
| RLRFRKPKSK | P69469 | 241 |
| RQQRKR | Q14980 | 242 |
| RRDLNSSFETSPKKVK | Q8K3G5 | 243 |
| RRDRAKLR | Q9SLB8 | 244 |
| RRGDGRRR | Q80WE1, Q5R9B4, Q06787, P35922 | 245 |
| RRGRKRKAEKQ | Q812D1, Q5XXA9, Q99JF8, Q8MJG1, | 246 |
| | Q66T72, O75475 | |
| RRKKRR | QOVD86, Q58DS6, Q5R6G2, Q9ERI5, | 247 |
| | Q6AYK2, Q6NYC1 | |
| RRKRSKSEDMDSVESKRRR | Q7TT18 | 248 |
| RRKRSR | Q99PU7, D3ZHS6, Q92560, A2VDM8 | 249 |
| RRPKGKTLQKRKPK | Q6ZN17 | 250 |
| RRRGFERFGPDNMGRKRK | Q63014, Q9DBR0 | 251 |
| RRRGKNKVAAQNCRK | SeqNLS | 252 |
| RRRKRR | Q5FVH8, Q6MZT1, Q08DH5, Q8BQP9 | 253 |
| RRRQKQKGGASRRR | SeqNLS | 254 |
| RRRREGPRARRRR | P08313, P10231 | 255 |
| RRTIRLKLVYDKCDRSCKIQ | SeqNLS | 256 |
| KKNRNKCQYCRFHKCLSVG | | |
| MSHNAIRFGRMPRSEKAKL | | |
| KAE | | |
| RRVPQRKEVSRCRKCRK | Q5RJN4, Q32L09, Q8CAK3, Q9NUL5 | 257 |
| RVGGRRQAVECIEDLLNEP | P03255 | 258 |
| GQPLDLSCKRPRP | | |
| RVVKLRIAP | P52639, Q8JMN0 | 259 |
| RVVRRR | P70278 | 260 |
| SKRKTKISRKTR | Q5RAY1, O00443 | 261 |
| SYVKTVPNRTRTYIKL | P21935 | 262 |
| TGKNEAKKRKIA | P52739, Q8K3J5, Q5RAU9 | 263 |
| TLSPASSPSSVSCPVIPASTD | SeqNLS | 264 |
| ESPGSALNI | | |
| VSKKQRTGKKIH | P52739, Q8K3J5, Q5RAU9 | 265 |
| SPKKKRKVE | | 266 |
| KRTAD GSEFE SPKKKRKVE | | 267 |
| PAAKRVKLD | | 268 |
| PKKKRKV | | 269 |
| MDSLLMNRRKFLYQFKNVR | | 142 |
| WAKGRRETYLC | | |
| SPKKKRKVEAS | | 270 |
| MAPKKKRKVGIHRGVP | | 271 |

[0608] In some embodiments, the NLS is a bipartite NLS. A bipartite NLS typically comprises two basic amino acid clusters separated by a spacer sequence (which may be, e.g., about 10 amino acids in length). A monopartite NLS typically lacks a spacer. An example of a bipartite NLS is the nucleoplasmin NLS, having the sequence KR[PAATKKAGQA]KKKK (SEQ ID NO: 272), wherein the spacer is bracketed. Another exemplary bipartite NLS has the sequence PKKKRKVEGADKRTADGSEFESPKKKRKV (SEQ ID NO: 273). Exemplary NLSs are described in International Application WO2020051561, which is herein incorporated by reference in its entirety, including for its disclosures regarding nuclear localization sequences.

### Linkers:

[0609] In some embodiments, domains of the compositions and systems described herein (e.g., the endonuclease and reverse transcriptase domains of a polypeptide or the DNA binding domain and reverse transcriptase domains of a polypeptide) may be joined by a linker. A composition described herein comprising a linker element has the general form S1-L-S2, wherein S1 and S2 may be the same or different and represent two domain moieties (e.g., each a polypeptide or nucleic acid domain) associated with one another by the linker. In some embodiments, a linker may connect two polypeptides. In some embodiments, a linker may connect two nucleic acid molecules. In some embodiments, a linker may connect a polypeptide and a nucleic acid molecule. A linker may be a chemical bond, e.g., one or more covalent bonds or non-covalent bonds. A linker may be flexible, rigid, and/or cleavable. In some embodiments, the linker is a peptide linker. Generally, a peptide linker is at least 2, 3, 4, 5, 6, 7, 8, 9, 10 or more amino acids in length, e.g., 2-50 amino acids in length, 2-30 amino acids in length.

[0610] The most commonly used flexible linkers have sequences consisting primarily of stretches of Gly and Ser residues (“GS” linker). Flexible linkers may be useful for joining domains that require a certain degree of movement or interaction and may include small, non-polar (e.g. Gly) or polar (e.g. Ser or Thr) amino acids. Incorporation of Ser or Thr can also maintain the stability of the linker in aqueous solutions by forming hydrogen bonds with the water molecules, and therefore reduce unfavorable interactions between the linker and the other moieties. Examples of such linkers include those having the structure [GGS]^{≥1} or [GGGS]^{≥1} (SEQ ID NO: 2). Rigid linkers are useful to keep a fixed distance between domains and to maintain their independent functions. Rigid linkers may also be useful when a spatial separation of the domains is critical to preserve the stability or bioactivity of one or more components in the agent. Rigid linkers may have an alpha helix-structure or Pro-rich sequence, (XP)n, with X designating any amino acid, preferably Ala, Lys, or Glu. Cleavable linkers may release free functional domains in vivo. In some embodiments, linkers may be cleaved under specific conditions, such as the presence of reducing reagents or proteases. In vivo cleavable linkers may utilize the reversible nature of a disulfide bond. One example includes a thrombin-sensitive sequence (e.g., PRS) between the two Cys residues. In vitro thrombin treatment of CPRSC (SEQ ID NO: 3) results in the cleavage of the thrombin-sensitive sequence, while the reversible disulfide linkage remains intact. Such linkers are known and described, e.g., in Chen et al. 2013. Fusion Protein Linkers: Property, Design and Functionality. Adv Drug Deliv Rev. 65(10): 1357-1369. In vivo cleavage of linkers in compositions described herein may also be carried out by proteases that are expressed in vivo under pathological conditions (e.g. cancer or inflammation), in specific cells or tissues, or constrained within certain cellular compartments. The specificity of many proteases offers slower cleavage of the linker in constrained compartments.

[0611] In some embodiments the amino acid linkers are (or are homologous to) the endogenous amino acids that exist between such domains in a native polypeptide. In some embodiments the endogenous amino acids that exist between such domains are substituted but the length is unchanged from the natural length. In some embodiments, additional amino acid residues are added to the naturally existing amino acid residues between domains.

[0612] In some embodiments, the amino acid linkers are designed computationally or screened to maximize protein function (Anad et al., FEBS Letters, 587:19, 2013).

[0613] In addition to being fully encoded on a single transcript, a polypeptide can be generated by separately expressing two or more polypeptide fragments that reconstitute the holoenzyme. In some embodiments, the Gene Writer polypeptide is generated by expressing as separate subunits that reassemble the holoenzyme through engineered protein-protein interactions. In some embodiments, reconstitution of the holoenzyme does not involve covalent binding between subunits. Peptides may also fuse together through trans-splicing of inteins (Tornabene et al. Sci Transl Med 11, eaav4523 (2019)). In some embodiments, the Gene Writer holoenzyme is expressed as separate subunits that are designed to create a fusion protein through the presence of split inteins (e.g., as described herein) in the subunits. In some embodiments, the Gene Writer holoenzyme is reconstituted through the formation of covalent linkages between subunits. In some embodiments, protein subunits reassemble through engineered protein-protein binding partners, e.g., SpyTag and SpyCatcher (Zakeri et al. PNAS 109, E690-E697 (2012)). In some embodiments, an additional domain described herein, e.g., a Cas9 nickase, is expressed as a separate polypeptide that associates with the Gene Writer polypeptide through covalent or non-covalent interactions as described above. In some embodiments, the breaking up of a Gene Writer polypeptide into subunits may aid in delivery of the protein by keeping the nucleic acid encoding each part within optimal packaging limits of a viral delivery vector, e.g., AAV (Tornabene et al. Sci Transl Med 11, eaav4523 (2019)). In some embodiments, the Gene Writer polypeptide is designed to be dimerized through the use of covalent or non-covalent interactions as described above.

### Inteins

[0614] In some embodiments, the Gene Writer system comprises an intein. Generally, an intein comprises a polypeptide that has the capacity to join two polypeptides or polypeptide fragments together via a peptide bond. In some embodiments, the intein is a trans-splicing intein that can join two polypeptide fragments, e.g., to form the polypeptide component of a system as described herein. In some embodiments, an intein may be encoded on the same nucleic acid molecule encoding the two polypeptide fragments. In certain embodiments, the intein may be translated as part of a larger polypeptide comprising, e.g., in order, the first polypeptide fragment, the intein, and the second polypeptide fragment. In embodiments, the translated intein may be capable of excising itself from the larger polypeptide, e.g., resulting in separation of the attached polypeptide fragments. In embodiments, the excised intein may be capable of joining the two polypeptide fragments to each other directly via a peptide bond. Exemplary inteins are described in, e.g., Table X of PCT Application No. PCT/US2021/020943.

### Evolved Variants of Polypeptide Components:

[0615] In some embodiments, the invention provides evolved variants of Gene Writers. Evolved variants can, in some embodiments, be produced by mutagenizing a reference Gene Writer, or one of the fragments or domains comprised therein. In some embodiments, one or more of the domains (e.g., a protein domain described herein, e.g., a structural polypeptide, reverse transcriptase, integrase, DNA binding (including, for example, sequence-guided DNA binding elements), or RNA-binding domain) is evolved. One or more of such evolved variant domains can, in some embodiments, be evolved alone or together with other domains, An evolved variant domain or domains may, in some embodiments, be combined with unevolved cognate component(s) or evolved variants of the cognate component(s), e.g., which may have been evolved in either a parallel or serial manner.

[0616] In some embodiments, the process of mutagenizing a reference Gene Writer polypeptide, or fragment or domain thereof, comprises mutagenizing the reference Gene Writer polypeptide or fragment or domain thereof. In embodiments, the mutagenesis comprises a continuous evolution method (e.g., PACE) or non-continuous evolution method (e.g., PANCE), e.g., as described herein. In some embodiments, the evolved Gene Writer poly peptide, or a fragment or domain thereof, comprises one or more amino acid variations introduced into its amino acid sequence relative to the amino acid sequence of the reference Gene Writer polypeptide, or fragment or domain thereof. In embodiments, amino acid sequence variations may include one or more mutated residues (e.g., conservative substitutions, non-conservative substitutions, or a combination thereof) within the amino acid sequence of a reference Gene Writer polypeptide, e.g., as a result of a change in the nucleotide sequence encoding the Gene Writer polypeptide that results in, e.g., a change in the codon at any particular position in the coding sequence, the deletion of one or more amino acids (e.g., a truncated protein), the insertion of one or more amino acids, or any combination of the foregoing. The evolved variant Gene Writer polypeptide may include variants in one or more components or domains of the Gene Writer polypeptide (e.g., variants introduced into a domain described herein, e.g., a structural polypeptide, reverse transcriptase, integrase, DNA binding (including, for example, sequence-guided DNA binding elements), or RNA-binding domain, or combinations thereof).

[0617] In some aspects, the invention provides Gene Writer genome editors, systems, kits, and methods using or comprising an evolved variant of a Gene Writer polypeptide, e.g., employs an evolved variant of a Gene Writer polypeptide or a Gene Writer poly peptide produced or produceable by PACE. or PANCE. In embodiments, the unevolved reference Gene Writer polypeptide is a Gene Writer polypeptide as disclosed herein.

[0618] The term “phage-assisted continuous evolution (PACE),” as used herein, generally refers to continuous evolution that employs phage as viral vectors. Examples of PACE technology have been described, for example, in International PCT Application No. PCT/US 2009/056194, filed Sep. 8, 2009, published as WO 2010/028347 on Mar. 11, 2010; International PCT Application, PCT/US2011/066747, filed Dec. 22, 2011, published as WO 2012/088381 on Jun. 28, 2012: U.S. Pat. No. 9,023,594, issued May 5, 2015: U.S. Pat. No. 9,771,574, issued Sep. 26, 2017; U.S. Pat. No. 9,394,537, issued Jul. 19, 2016; International PCT Application, PCT/US2015/012022, filed Jan. 20, 2015, published as WO 2015/134121 on Sep. 11, 2015; U.S. Pat. No. 10,179,911, issued Jan. 15, 2019; and International PCT Application, PCT/US2016/027795, filed Apr. 15, 2016, published as WO 2016/168631 on Oct. 20, 2016, the entire contents of each of which are incorporated herein by reference.

[0619] The term “phage-assisted non-continuous evolution (PANCE),” as used herein, generally refers to non-continuous evolution that employs phage as viral vectors. Examples of PANCE technology have been described, for example, in Suzuki T. et al., Crystal structures reveal an elusive functional domain of pyrrolysyl-tRNA synthetase, Nat Chen Biol. 13(12): 1261-1266 (2017), incorporated herein by reference in its entirety. Briefly, PANCE is a technique for rapid in vivo directed evolution using serial flask transfers of evolving selection phage (SP), which contain a gene of interest to be evolved, across fresh host cells (e.g., E. coli cells). Genes inside the host cell may be held constant while genes contained in the SP continuously evolve. Following phage growth, an aliquot of infected cells may be used to transfect a subsequent flask containing host E. coli. This process can be repeated and/or continued until the desired phenotype is evolved, e.g., for as many transfers as desired.

[0620] Methods of applying PACE and PANCE to Gene Writer components may be readily appreciated by the skilled artisan by reference to, inter alia, the foregoing references. Additional exemplary methods for directing continuous evolution of genome-identifying proteins or systems, e.g., in a population of host cells, e.g., using phage particles, can be applied to generate evolved variants of Gene Writer polypeptides, or fragments or subdomains thereof. Non-limiting examples of such methods are described in International PCT Application, PCT/US2009/056194, filed Sep. 8, 2009, published as WO 2010/028347 on Mar. 11, 2010; International PCT Application, PCT/US2011/066747, filed Dec. 22, 2011, published as WO 2012/088381 on Jun. 28, 2012: U.S. Pat. No. 9,023,594, issued May 5, 2015: U.S. Pat. No. 9,771,574, issued Sep. 26, 2017; U.S. Pat. No. 9,394,537, issued Jul. 19, 2016; International PCT Application, PCT/US2015/012022, filed Jan. 20, 2015, published as WO 2015/134121 on Sep. 11, 2015; U.S. Pat. No. 10,179,911, issued Jan. 15, 2019; international Application No. PCT/US2019/37216, filed Jun. 14, 2019, International Patent Publication WO 2019/023680, published Jan. 31, 2019, International PCT Application, PCT/US2016/027795, filed Apr. 15, 2016, published as WO 2016/168631 on Oct. 20, 2016, and International Patent Publication No. PCT/US2019/47996, filed Aug. 23, 2019, each of which is incorporated herein by reference in its entirety.

[0621] In some non-limiting illustrative embodiments, a method of evolution of a evolved variant Gene Writer polypeptide, of a fragment or domain thereof, comprises: (a) contacting a population of host cells with a population of viral vectors comprising the gene of interest (the starting Gene Writer polypeptide or fragment or domain thereof), wherein: (1) the host cell is amenable to infection by the viral vector; (2) the host cell expresses viral genes required for the generation of viral particles; (3) the expression of at least one viral gene required for the production of an infectious viral particle is dependent on a function of the gene of interest; and/or (4) the viral vector allows for expression of the protein in the host cell, and can be replicated and packaged into a viral particle by the host cell. In some embodiments, the method comprises (b) contacting the host cells with a mutagen, using host cells with mutations that elevate mutation rate (e.g., either by carrying a mutation plasmid or some genome modification—e.g., proofing-impaired DNA polymerase, SOS genes, such as UmuC, UmuD′, and/or RecA, which mutations, if plasmid-bound, may be under control of an inducible promoter), or a combination thereof. In some embodiments, the method comprises (c) incubating the population of host cells under conditions allowing for viral replication and the production of viral particles, wherein host cells are removed from the host cell population, and fresh, uninfected host cells are introduced into the population of host cells, thus replenishing the population of host cells and creating a flow of host cells. In some embodiments, the cells are incubated under conditions allowing for the gene of interest to acquire a mutation. In some embodiments, the method further comprises (d) isolating a mutated version of the viral vector, encoding an evolved gene product (e.g., an evolved variant Gene Writer polypeptide, or fragment or domain thereof), from the population of host cells.

[0622] The skilled artisan will appreciate a variety of features employable within the above-described framework. For example, in some embodiments, the viral vector or the phage is a filamentous phage, for example, an M13 phage, e.g., an M13 selection phage. In certain embodiments, the gene required for the production of infectious viral particles is the M13 gene III (gIII). In embodiments, the phage may lack a functional gill, but otherwise comprise gI, gII, gIV, gV, gVI, gVII gVIII, gIX, and a gX. In some embodiments, the generation of infectious VSV particles involves the envelope protein VSV-G, Various embodiments can use different retroviral vectors, for example, Murine Leukemia Virus vectors, or Lentiviral vectors. In embodiments, the retroviral vectors can efficiently be packaged with VSV-G envelope protein, e.g., as a substitute for the native envelope protein of the virus.

[0623] In some embodiments, host cells are incubated according to a suitable number of viral life cycles, e.g., at least 10, at least 20, at least 30, at least 40, at least 50, at least 100, at least 200, at least 300, at least 400, at least, 500, at least 600, at least 700, at least 800, at least 900, at least 1000, at least 1250, at least 1500, at least 1750, at least 2000, at least 2500, at least 3000, at least 4000, at least 5000, at least 7500, at least 10000, or more consecutive viral life cycles, which in on illustrative and non-limiting examples of M13 phage is 10-20 minutes per virus life cycle. Similarly, conditions can be modulated to adjust the time a host cell remains in a population of host cells, e.g., about 10, about 11, about 12, about 13, about 14, about 15, about 16, about 17, about 18, about 19, about 20, about 21, about 22, about 23, about 24, about 25, about 30, about 35, about 40, about 45, about 50, about 55, about 60, about 70, about 80, about 90, about 100, about 120, about 150, or about 180 minutes. Host cell populations can be controlled in part by density of the host cells, or, in some embodiments, the host cell density in an inflow, e.g., 10³ cells/ml, about 10⁴ cells/ml, about 10⁵ cells/ml, about 5-10⁵ cells/ml, about 10⁶ cells/ml, about 5-10⁶ cells/ml, about 10⁷ cells/ml, about 5-10⁷ cells/ml, about 10⁸ cells/ml, about 5-10⁸ cells/ml, about 10⁹ cells/ml, about 5-10⁹ cells/ml, about 10¹⁰ cells/ml, or about 5-10¹⁰ cells/ml.

### Other Sequence Modifications and Improvements:

[0624] In some embodiments, a polypeptide for use in any of the systems described herein can be a molecular reconstruction or ancestral reconstruction based upon the aligned polypeptide sequence of multiple instances, e.g., from sequences representing multiple copies of an LTR retrotransposon in a host genome. In some embodiments, a 5′ or 3′ untranslated region for use in any of the systems described herein can be a molecular reconstruction based upon the aligned 5′ or 3′ untranslated region of multiple retrotransposons. Based on the Accession numbers provided herein, polypeptides or nucleic acid sequences can be aligned, e.g., by using routine sequence analysis tools as Basic Local Alignment Search Tool (BLAST) or CD-Search for conserved domain analysis. Molecular reconstructions can be created based upon sequence consensus, e.g. using approaches described in Ivics et al., Cell 1997, 501-510; Wagstaff et al., Molecular Biology and Evolution 2013, 88-99. In some embodiments, the retrotransposon from which the 5′ or 3′ untranslated region or polypeptide is derived is a young or a recently active mobile element, as assessed via phylogenetic methods such as those described in Boissinot et al., Molecular Biology and Evolution 2000, 915-928.

### Gene Writer System Modifications of DNA Target Sites

[0625] In some embodiments, a Gene Writer system is capable of producing an insertion into the target site of at least 45, 50, 55, 60, 65, 70, 75, 80, 85, 90, 95, or 100 nucleotides (and optionally no more than 500, 400, 300, 200, or 100 nucleotides). In some embodiments, a Gene Writer system is capable of producing an insertion into the target site of at least 1, 2, 3, 4, 5, 6, 7, 8, 9, 10, 15, 20, 25, 30, 35, 40, 45, 50, 55, 60, 65, 70, 75, 80, 85, 90, 95, or 100 nucleotides (and optionally no more than 500, 400, 300, 200, or 100 nucleotides). In some embodiments, a Gene Writer system is capable of producing an insertion into the target site of at least 0.2, 0.3, 0.4, 0.5, 0.6, 0.7, 0.8, 0.9, 1, 1.5, 2, 2.5, 3, 3.5, 4, 4.5, 5, 5.5, 6, 6.5, 7, 7.5, 8, 8.5, 9, 9.5 or 10 kilobases (and optionally no more than 1, 5, 10, or 20 kilobases).

[0626] In some embodiments, an insertion as described herein increases or decreases expression (e.g. transcription or translation) of a gene. In some embodiments, an insertion increases or decreases expression (e.g. transcription or translation) of a gene by adding sequences in a promoter or enhancer, e.g. sequences that bind transcription factors. In some embodiments, an insertion alters translation of a gene (e.g. alters an amino acid sequence), inserts or disrupts a start or stop codon, or alters or fixes the translation frame of a gene. In some embodiments, an insertion results in the functional knockout of an endogenous gene by disruption of a coding or regulatory sequence. In some embodiments, an insertion alters splicing of a gene, e.g. by inserting or disrupting a splice acceptor or donor site. In some embodiments, an insertion alters transcript or protein half-life. In some embodiments, an insertion alters protein localization in the cell (e.g. from the cytoplasm to a mitochondria, from the cytoplasm into the extracellular space (e.g. adds a secretion tag)). In some embodiments, an insertion alters (e.g. improves) protein folding (e.g. to prevent accumulation of misfolded proteins). In some embodiments, an insertion alters, increases, or decreases the activity of a gene, e.g., a protein encoded by the gene.

[0627] In some embodiments, the GeneWriter polypeptide results in insertion of the heterologous object sequence (e.g., the GFP gene) into the target locus (e.g., rDNA) at an average copy number of at least 0.01, 0.025, 0.05, 0.075, 0.1, 0.15, 0.2, 0.25, 0.3, 0.4, 0.5, 0.75, 1, 1.25, 1.5, 1.75, 2, 2.5, 3, 4, or 5 copies per genome. In some embodiments, a cell described herein (e.g., a cell comprising a heterologous sequence at a target insertion site) comprises the heterologous object sequence at an average copy number of at least 0.01, 0.025, 0.05, 0.075, 0.1, 0.15, 0.2, 0.25, 0.3, 0.4, 0.5, 0.75, 1, 1.25, 1.5, 1.75, 2, 2.5, 3, 4, or 5 copies per genome.

[0628] In some embodiments, a system or method described herein results in insertion of the heterologous object sequence only at one target site in the genome of the target cell. Insertion can be measured, e.g., using a threshold of above 1%, 1.5%, 2%, 2.5%, 3%, 3.5%, 4%, 4.5%, 5%, e.g., as described in Example 8 of PCT Application No. PCT/US2019/048607, incorporated herein by reference in its entirety. In some embodiments, a system or method described herein results in insertion of the heterologous object sequence wherein less than 1%, 1.5%, 2%, 2.5%, 3%, 3.5%, 4%, 4.5%, 5%, 10%, 20%, 30%, 40%, or 50% of insertions are at a site other than the target site, e.g., using an assay described herein, e.g., an assay of Example 8 of PCT Application No. PCT/US2019/048607, incorporated herein by reference in its entirety.

[0629] In some embodiments, a system or method described herein results in “scarless” insertion of the heterologous object sequence, while in some embodiments, the target site can show deletions or duplications of endogenous DNA as a result of insertion of the heterologous sequence. The mechanisms of different retrotransposons could result in different patterns of duplications or deletions in the host genome occurring during retrotransposition at the target site. In some embodiments, the system results in a scarless insertion, with no duplications or deletions in the surrounding genomic DNA. In some embodiments, the system results in a deletion of less than 1, 2, 3, 4, 5, 10, 50, or 100 bp of genomic DNA upstream of the insertion. In some embodiments, the system results in a deletion of less than 1, 2, 3, 4, 5, 10, 50, or 100 bp of genomic DNA downstream of the insertion. In some embodiments, the system results in a duplication of less than 1, 2, 3, 4, 5, 10, 50, or 100 bp of genomic DNA upstream of the insertion. In some embodiments, the system results in a duplication of less than 1, 2, 3, 4, 5, 10, 50, or 100 bp of genomic DNA downstream of the insertion.

[0630] In some embodiments, a system or method described herein results in insertion of a heterologous sequence into a target site in the human genome. In some embodiments, the target site in the human genome has sequence similarity to the corresponding target site of the corresponding wild-type retrotransposase (e.g., the retrotransposase from which the GeneWriter was derived) in the genome of the organism to which it is native. For instance, in some embodiments, the identity between the 40 nucleotides of human genome sequence centered at the insertion site and the 40 nucleotides of native organism genome sequence centered at the insertion site is less than 99.5%, 99%, 98%, 97%, 96%, 95%, 90%, 85%, 80%, 75%, 70%, 60%, or 50%, or is between 50-60%, 60-70%, 70-80%, 80-90%, or 90-100%. In some embodiments, the identity between the 100 nucleotides of human genome sequence centered at the insertion site and the 100 nucleotides of native organism genome sequence centered at the insertion site is less than 99.5%, 99%, 98%, 97%, 96%, 95%, 90%, 85%, 80%, 75%, 70%, 60%, or 50%, or is between 50-60%, 60-70%, 70-80%, 80-90%, or 90-100%. In some embodiments, the identity between the 500 nucleotides of human genome sequence centered at the insertion site and the 500 nucleotides of native organism genome sequence centered at the insertion site is less than 99.5%, 99%, 98%, 97%, 96%, 95%, 90%, 85%, 80%, 75%, 70%, 60%, or 50%, or is between 50-60%, 60-70%, 70-80%, 80-90%, or 90-100%.

[0631] In some embodiments, after Gene Writing, the target site surrounding the integrated sequence contains a limited number of insertions or deletions, for example, in less than about 50% or 10% of integration events, e.g., as determined by long-read amplicon sequencing of the target site, e.g., as described in Karst et al. (2020) bioRxiv doi.org/10.1101/645903 (incorporated by reference herein in its entirety). In some embodiments, the target site does not show multiple insertion events, e.g., head-to-tail or head-to-head duplications, e.g., as determined by long-read amplicon sequencing of the target site, e.g., as described in Karst et al. bioRxiv doi.org/10.1101/645903 (2020) (incorporated herein by reference in its entirety). In some embodiments, the target site contains an integrated sequence corresponding to the template RNA. In some embodiments, the target site does not contain insertions resulting from endogenous RNA in more than about 1% or 10% of events, e.g., as determined by long-read amplicon sequencing of the target site, e.g., as described in Karst et al. bioRxiv doi.org/10.1101/645903 (2020) (incorporated herein by reference in its entirety). In some embodiments, the target site contains the integrated sequence corresponding to the template RNA.

[0632] In some embodiments, after Gene Writing, the target site contains an integrated sequence corresponding to the template RNA. In embodiments, the target site does not comprise sequence outside of the template RNA (e.g., reverse transcribed endogenous RNA, vector backbone, and/or ITRs), e.g., as determined by long-read amplicon sequencing of the target site (for example, as described in Karst et al. bioRxiv doi.org/10.1101/645903 (2020); incorporated herein by reference in its entirety).

### Applications

[0633] By integrating coding genes into a RNA sequence template, the Gene Writer system can address therapeutic needs, for example, by providing expression of a therapeutic transgene in individuals with loss-of-function mutations, by replacing gain-of-function mutations with normal transgenes, by providing regulatory sequences to eliminate gain-of-function mutation expression, and/or by controlling the expression of operably linked genes, transgenes and systems thereof. In certain embodiments, the RNA sequence template encodes a promotor region specific to the therapeutic needs of the host cell, for example a tissue specific promotor or enhancer. In still other embodiments, a promotor can be operably linked to a coding sequence.

[0634] In embodiments, the Gene Writer™ gene editor system can provide therapeutic transgenes expressing, e.g., replacement blood factors or replacement enzymes, e.g., lysosomal enzymes. For example, the compositions, systems and methods described herein are useful to express, in a target human genome, agalsidase alpha or beta for treatment of Fabry Disease; imiglucerase, taliglucerase alfa, velaglucerase alfa, or alglucerase for Gaucher Disease; sebelipase alpha for lysosomal acid lipase deficiency (Wolman disease/CESD); laronidase, idursulfase, elosulfase alpha, or galsulfase for mucopolysaccharidoses; alglucosidase alpha for Pompe disease. For example, the compositions, systems and methods described herein are useful to express, in a target human genome factor I, II, V, VII, X, XI, XII or XIII for blood factor deficiencies.

[0635] In some embodiments, the heterologous object sequence encodes an intracellular protein (e.g., a cytoplasmic protein, a nuclear protein, an organellar protein such as a mitochondrial protein or lysosomal protein, or a membrane protein). In some embodiments, the heterologous object sequence encodes a membrane protein, e.g., a membrane protein other than a CAR, and/or an endogenous human membrane protein. In some embodiments, the heterologous object sequence encodes an extracellular protein. In some embodiments, the heterologous object sequence encodes an enzyme, a structural protein, a signaling protein, a regulatory protein, a transport protein, a sensory protein, a motor protein, a defense protein, or a storage protein. Other exemplary proteins that may be encoded by a heterologous object sequence include, without limitation, a immune receptor protein, e.g. a synthetic immune receptor protein such as a chimeric antigen receptor protein (CAR), a T cell receptor, a B cell receptor, or an antibody.

### Administration

[0636] The composition and systems described herein may be used in vitro or in vivo. In some embodiments the system or components of the system are delivered to cells (e.g., mammalian cells, e.g., human cells), e.g., in vitro or in vivo. In some embodiments, the cells are eukaryotic cells, e.g., cells of a multicellular organism, e.g., an animal, e.g., a mammal (e.g., human, swine, bovine) a bird (e.g., poultry, such as chicken, turkey, or duck), or a fish. In some embodiments, the cells are non-human animal cells (e.g., a laboratory animal, a livestock animal, or a companion animal). In some embodiments, the cell is a stem cell (e.g., a hematopoietic stem cell), a fibroblast, or a T cell. In some embodiments, the cell is a non-dividing cell, e.g., a non-dividing fibroblast or non-dividing T cell. In some embodiments, the cell is an HSC and p53 is not upregulated or is upregulated by less than 10%, 5%, 2%, or 1%, e.g., as determined according to the method described in Example 30 of PCT Application No. PCT/US2019/048607, incorporated herein by reference in its entirety. In some embodiments, a Gene Writing system described herein is used to make an edit in HEK293, K562, U2OS, or HeLa cells. In some embodiment, a Gene Writing system is used to make an edit in primary cells, e.g., primary cortical neurons from E18.5 mice. The components of the Gene Writer system may, in some instances, be delivered in the form of polypeptide, nucleic acid (e.g., DNA, RNA), and combinations thereof.

[0637] For instance, delivery can use any of the following combinations for delivering one or more retroviral or retrotransposon proteins (e.g., an integrase, structural polypeptide domain, and/or reverse transcriptase polypeptide domain, e.g., as described herein) (e.g., as DNA encoding the retroviral or retrotransposon protein, as RNA encoding the integrase protein, or as the protein itself) and the template RNA (e.g., as DNA encoding the RNA, or as RNA):
[0638] 1. Retroviral or retrotransposon protein-coding DNA+template DNA
[0639] 2. Retroviral or retrotransposon protein-coding RNA+template DNA
[0640] 3. Retroviral or retrotransposon protein-coding DNA+template RNA
[0641] 4. Retroviral or retrotransposon protein-coding RNA+template RNA
[0642] 5. Retroviral or retrotransposon protein+template DNA
[0643] 6. Retroviral or retrotransposon protein+template RNA
[0644] 7. Retroviral or retrotransposon protein-coding virus+template virus
[0645] 8. Retroviral or retrotransposon protein-coding virus+template DNA
[0646] 9. Retroviral or retrotransposon protein-coding virus+template RNA
[0647] 10. Retroviral or retrotransposon protein-coding DNA+template virus
[0648] 11. Retroviral or retrotransposon protein-coding RNA+template virus
[0649] 12. Retroviral or retrotransposon protein+template virus

[0650] In some embodiments, the ratio of the construct delivering the retroviral or retrotransposon protein-coding (e.g., a driver construct as described herein) and the template RNA is between 10:1 and 1:10 (e.g., between 10:5 to 10:1, 10:5 to 10:2, 10:5 to 10:1, 5:1 to 2:1, 5:1 to 1:1, 4:1 to 2:1, 4:1 to 1:1, 3:1 to 2:1, 3:1 to 1:1, 2:1 to 1:1, 1:1 to 1:2, 1:1 to 1:3, 1:2 to 1:3, 1:1 to 1:4, 1:2 to 1:4, 1:1 to 1:5, 1:2 to 1:5, 1:1 to 1:10, 1:2 to 1:10, or 1:5 to 1:10). In certain embodiments, the ratio of the construct delivering the retroviral or retrotransposon protein-coding (e.g., a driver construct as described herein) and the template RNA is 1:1.

[0651] As indicated above, in some embodiments, the DNA or RNA that encodes the integrase protein is delivered using a virus, and in some embodiments, the template RNA (or the DNA encoding the template RNA) is delivered using a virus.

[0652] In some embodiments, a template DNA or RNA does not comprise a sequence encoding a functional viral protein (e.g., gag, pol, or a viral reverse transcriptase and/or integrase as described herein, or functional fragments thereof). In some embodiments, the template DNA or RNA comprises an in-frame deletion of a viral gene, e.g., a gene encoding a functional viral protein (e.g., gag, pol, or a viral reverse transcriptase and/or integrase as described herein, or functional fragments thereof). In some embodiments, the template DNA or RNA is introduced into a cell with (e.g., prior to, concurrently with, or after) a driver construct (e.g., a DNA or RNA driver construct) as described herein (e.g., a driver construct comprising one or more genes encoding functional viral proteins, e.g., gag, pol, or a viral reverse transcriptase and/or integrase as described herein, or functional fragments thereof). In some embodiments, a driver construct has a structure as shown in any of FIGS. 9-13. In some embodiments, a template DNA or RNA has a structure as shown in any of FIGS. 9-13. In some embodiments, the heterologous object sequence is between the first LTR and the second LTR, and one or more sequences encoding functional viral proteins (e.g., gag, pol, or a viral reverse transcriptase and/or integrase as described herein, or functional fragments thereof) is between the first LTR and second LTR (e.g., between the first LTR and the heterologous object sequence).

[0653] In some embodiments, a template DNA or RNA comprises one or more sequences encoding a functional viral protein (e.g., gag, pol, or a viral reverse transcriptase and/or integrase as described herein, or functional fragments thereof). In some embodiments, template DNA or RNA comprises a sequence encoding a functional viral gag protein, or a functional fragment thereof. In some embodiments, template DNA or RNA comprises a sequence encoding a functional viral pol protein, or a functional fragment thereof. In some embodiments, template DNA or RNA comprises a sequence encoding a functional viral reverse transcriptase protein, or a functional fragment thereof. In some embodiments, template DNA or RNA comprises a sequence encoding a functional viral integrase protein, or a functional fragment thereof. In certain embodiments, the template DNA or RNA comprises a sequence encoding a functional viral gag protein, a functional viral pol protein, and a functional viral reverse transcriptase and/or integrase protein, e.g., as described herein, or functional fragments thereof. In certain embodiments, the sequences encoding functional viral proteins are positioned between the primer binding site and the heterologous object sequence. In some embodiments, a template DNA or RNA has a structure as shown in any of FIGS. 9-13.

[0654] In one embodiments the system and/or components of the system are delivered as nucleic acid. For example, the Gene Writer polypeptide may be delivered in the form of a DNA or RNA encoding the polypeptide, and the template RNA may be delivered in the form of RNA or its complementary DNA to be transcribed into RNA. In some embodiments the system or components of the system are delivered on 1, 2, 3, 4, or more distinct nucleic acid molecules. In some embodiments the system or components of the system are delivered as a combination of DNA and RNA. In some embodiments the system or components of the system are delivered as a combination of DNA and protein. In some embodiments the system or components of the system are delivered as a combination of RNA and protein. In some embodiments the Gene Writer genome editor polypeptide is delivered as a protein.

[0655] In some embodiments the system or components of the system are delivered to cells, e.g. mammalian cells or human cells, using a vector. The vector may be, e.g., a plasmid or a virus. In some embodiments delivery is in vivo, in vitro, ex vivo, or in situ. In some embodiments the virus is an adeno associated virus (AAV), a lentivirus, an adenovirus. In some embodiments the system or components of the system are delivered to cells with a viral-like particle or a virosome. In some embodiments the delivery uses more than one virus, viral-like particle or virosome.

[0656] In one embodiment, the compositions and systems described herein can be formulated in liposomes or other similar vesicles. Liposomes are spherical vesicle structures composed of a uni- or multilamellar lipid bilayer surrounding internal aqueous compartments and a relatively impermeable outer lipophilic phospholipid bilayer. Liposomes may be anionic, neutral or cationic. Liposomes are biocompatible, nontoxic, can deliver both hydrophilic and lipophilic drug molecules, protect their cargo from degradation by plasma enzymes, and transport their load across biological membranes and the blood brain barrier (BBB) (see, e.g., Spuch and Navarro, Journal of Drug Delivery, vol. 2011, Article ID 469679, 12 pages, 2011. doi:10.1155/2011/469679 for review).

[0657] Vesicles can be made from several different types of lipids; however, phospholipids are most commonly used to generate liposomes as drug carriers. Methods for preparation of multilamellar vesicle lipids are known in the art (see for example U.S. Pat. No. 6,693,086, the teachings of which relating to multilamellar vesicle lipid preparation are incorporated herein by reference). Although vesicle formation can be spontaneous when a lipid film is mixed with an aqueous solution, it can also be expedited by applying force in the form of shaking by using a homogenizer, sonicator, or an extrusion apparatus (see, e.g., Spuch and Navarro, Journal of Drug Delivery, vol. 2011, Article ID 469679, 12 pages, 2011. doi:10.1155/2011/469679 for review). Extruded lipids can be prepared by extruding through filters of decreasing size, as described in Templeton et al., Nature Biotech, 15:647-652, 1997, the teachings of which relating to extruded lipid preparation are incorporated herein by reference.

[0658] Lipid nanoparticles are another example of a carrier that provides a biocompatible and biodegradable delivery system for the pharmaceutical compositions described herein. Nanostructured lipid carriers (NLCs) are modified solid lipid nanoparticles (SLNs) that retain the characteristics of the SLN, improve drug stability and loading capacity, and prevent drug leakage. Polymer nanoparticles (PNPs) are an important component of drug delivery. These nanoparticles can effectively direct drug delivery to specific targets and improve drug stability and controlled drug release. Lipid-polymer nanoparticles (PLNs), a new type of carrier that combines liposomes and polymers, may also be employed. These nanoparticles possess the complementary advantages of PNPs and liposomes. A PLN is composed of a core-shell structure; the polymer core provides a stable structure, and the phospholipid shell offers good biocompatibility. As such, the two components increase the drug encapsulation efficiency rate, facilitate surface modification, and prevent leakage of water-soluble drugs. For a review, see, e.g., Li et al. 2017, Nanomaterials 7, 122; doi:10.3390/nano7060122.

[0659] Exosomes can also be used as drug delivery vehicles for the compositions and systems described herein. For a review, see Ha et al. July 2016. Acta Pharmaceutica Sinica B. Volume 6, Issue 4, Pages 287-296; https://doi.org/10.1016/j.apsb.2016.02.001.

[0660] Fusosomes interact and fuse with target cells, and thus can be used as delivery vehicles for a variety of molecules. They generally consist of a bilayer of amphipathic lipids enclosing a lumen or cavity and a fusogen that interacts with the amphipathic lipid bilayer. The fusogen component has been shown to be engineerable in order to confer target cell specificity for the fusion and payload delivery, allowing the creation of delivery vehicles with programmable cell specificity (see, for example, the relating to fusosome design, preparation, and usage in PCT Publication No. WO/2020014209, incorporated herein by reference in its entirety).

[0661] A Gene Writer system can be introduced into cells, tissues and multicellular organisms. In some embodiments the system or components of the system are delivered to the cells via mechanical means or physical means.

[0662] Formulation of protein therapeutics is described in Meyer (Ed.), Therapeutic Protein Drug Products: Practical Approaches to formulation in the Laboratory, Manufacturing, and the Clinic, Woodhead Publishing Series (2012).

### 1.1.1 Tissue Specific Activity/Administration

[0663] In some embodiments, a system, template RNA, or polypeptide described herein is administered to or is active in (e.g., is more active in) a target tissue, e.g., a first tissue. In some embodiments, the system, template RNA, or polypeptide is not administered to or is less active in (e.g., not active in) a non-target tissue. In some embodiments, a system, template RNA, or polypeptide described herein is useful for modifying DNA in a target tissue, e.g., a first tissue, (e.g., and not modifying DNA in a non-target tissue).

[0664] In some embodiments, a system comprises (a) a polypeptide described herein or a nucleic acid encoding the same, (b) a template nucleic acid (e.g., template RNA) described herein, and (c) one or more first tissue-specific expression-control sequences specific to the target tissue, wherein the one or more first tissue-specific expression-control sequences specific to the target tissue are in operative association with (a), (b), or (a) and (b), wherein, when associated with (a), (a) comprises a nucleic acid encoding the polypeptide.

[0665] In some embodiments, the nucleic acid in (b) comprises RNA.

[0666] In some embodiments, the nucleic acid in (b) comprises DNA.

[0667] In some embodiments, the nucleic acid in (b): (i) is single-stranded or comprises a single-stranded segment, e.g., is single-stranded DNA or comprises a single-stranded segment and one or more double stranded segments; (ii) has inverted terminal repeats; or (iii) both (i) and (ii).

[0668] In some embodiments, the nucleic acid in (b) is double-stranded or comprises a double-stranded segment.

[0669] In some embodiments, (a) comprises a nucleic acid encoding the polypeptide.

[0670] In some embodiments, the nucleic acid in (a) comprises RNA.

[0671] In some embodiments, the nucleic acid in (a) comprises DNA.

[0672] In some embodiments, the nucleic acid in (a): (i) is single-stranded or comprises a single-stranded segment, e.g., is single-stranded DNA or comprises a single-stranded segment and one or more double stranded segments; (ii) has inverted terminal repeats; or (iii) both (i) and (ii).

[0673] In some embodiments, the nucleic acid in (a) is double-stranded or comprises a double-stranded segment.

[0674] In some embodiments, the nucleic acid in (a), (b), or (a) and (b) is linear.

[0675] In some embodiments, the nucleic acid in (a), (b), or (a) and (b) is circular, e.g., a plasmid or minicircle.

[0676] In some embodiments, the heterologous object sequence is in operative association with a first promoter.

[0677] In some embodiments, the one or more first tissue-specific expression-control sequences comprises a tissue specific promoter.

[0678] In some embodiments, the tissue-specific promoter comprises a first promoter in operative association with: i. the heterologous object sequence, ii. a nucleic acid encoding the transposase, or iii. (i) and (ii).

[0679] In some embodiments, the one or more first tissue-specific expression-control sequences comprises a tissue-specific microRNA recognition sequence in operative association with: i. the heterologous object sequence, ii. a nucleic acid encoding the transposase, or iii. (i) and (ii).

[0680] In some embodiments, a system comprises a tissue-specific promoter, and the system further comprises one or more tissue-specific microRNA recognition sequences, wherein: i. the tissue specific promoter is in operative association with: I. the heterologous object sequence, II. a nucleic acid encoding the transposase, or III. (I) and (II); and/or ii. the one or more tissue-specific microRNA recognition sequences are in operative association with: I. the heterologous object sequence, II. a nucleic acid encoding the transposase, or III.(I) and (II).

[0681] In some embodiments, wherein (a) comprises a nucleic acid encoding the polypeptide, the nucleic acid comprises a promoter in operative association with the nucleic acid encoding the polypeptide.

[0682] In some embodiments, the nucleic acid encoding the polypeptide comprises one or more second tissue-specific expression-control sequences specific to the target tissue in operative association with the polypeptide coding sequence.

[0683] In some embodiments, the one or more second tissue-specific expression-control sequences comprises a tissue specific promoter.

[0684] In some embodiments, the tissue-specific promoter is the promoter in operative association with the nucleic acid encoding the polypeptide.

[0685] In some embodiments, the one or more second tissue-specific expression-control sequences comprises a tissue-specific microRNA recognition sequence.

[0686] In some embodiments, the promoter in operative association with the nucleic acid encoding the polypeptide is a tissue-specific promoter, the system further comprising one or more tissue-specific microRNA recognition sequences.

[0687] In some embodiments, a Gene Writer™ system described herein is delivered to a tissue or cell from the cerebrum, cerebellum, adrenal gland, ovary, pancreas, parathyroid gland, hypophysis, testis, thyroid gland, breast, spleen, tonsil, thymus, lymph node, bone marrow, lung, cardiac muscle, esophagus, stomach, small intestine, colon, liver, salivary gland, kidney, prostate, blood, or other cell or tissue type. In some embodiments, a Gene Writer™ system described herein is used to treat a disease, such as a cancer, inflammatory disease, infectious disease, genetic defect, or other disease. A cancer can be cancer of the cerebrum, cerebellum, adrenal gland, ovary, pancreas, parathyroid gland, hypophysis, testis, thyroid gland, breast, spleen, tonsil, thymus, lymph node, bone marrow, lung, cardiac muscle, esophagus, stomach, small intestine, colon, liver, salivary gland, kidney, prostate, blood, or other cell or tissue type, and can include multiple cancers.

[0688] In some embodiments, a Gene Writer™ system described herein described herein is administered by enteral administration (e.g. oral, rectal, gastrointestinal, sublingual, sublabial, or buccal administration). In some embodiments, a Gene Writer™ system described herein is administered by parenteral administration (e.g., intravenous, intramuscular, subcutaneous, intradermal, epidural, intracerebral, intracerebroventricular, epicutaneous, nasal, intra-arterial, intra-articular, intracavernous, intraocular, intraosseous infusion, intraperitoneal, intrathecal, intrauterine, intravaginal, intravesical, perivascular, or transmucosal administration). In some embodiments, a Gene Writer™ system described herein is administered by topical administration (e.g., transdermal administration).

[0689] In some embodiments, a Gene Writer™ system as described herein can be used to modify an animal cell, plant cell, or fungal cell. In some embodiments, a Gene Writer™ system as described herein can be used to modify a mammalian cell (e.g., a human cell). In some embodiments, a Gene Writer™ system as described herein can be used to modify a cell from a livestock animal (e.g., a cow, horse, sheep, goat, pig, llama, alpaca, camel, yak, chicken, duck, goose, or ostrich). In some embodiments, a Gene Writer™ system as described herein can be used as a laboratory tool or a research tool, or used in a laboratory method or research method, e.g., to modify an animal cell, e.g., a mammalian cell (e.g., a human cell), a plant cell, or a fungal cell.

[0690] In some embodiments, a Gene Writer™ system as described herein can be used to express a protein, template, or heterologous object sequence (e.g., in an animal cell, e.g., a mammalian cell (e.g., a human cell), a plant cell, or a fungal cell). In some embodiments, a Gene Writer™ system as described herein can be used to express a protein, template, or heterologous object sequence under the control of an inducible promoter (e.g., a small molecule inducible promoter). In some embodiments, a Gene Writing system or payload thereof is designed for tunable control, e.g., by the use of an inducible promoter. For example, a promoter, e.g., Tet, driving a gene of interest may be silent at integration, but may, in some instances, activated upon exposure to a small molecule inducer, e.g., doxycycline. In some embodiments, the tunable expression allows post-treatment control of a gene (e.g., a therapeutic gene), e.g., permitting a small molecule-dependent dosing effect. In embodiments, the small molecule-dependent dosing effect comprises altering levels of the gene product temporally and/or spatially, e.g., by local administration. In some embodiments, a promoter used in a system described herein may be inducible, e.g., responsive to an endogenous molecule of the host and/or an exogenous small molecule administered thereto.

[0691] In some embodiments, a Gene Writing system is used to make changes to non-coding and/or regulatory control regions, e.g., to tune the expression of endogenous genes. In some embodiments, a Gene Writing system is used to induce upregulation or downregulation of gene expression. In some embodiments, a regulatory control region comprises one or more of a promoter, enhancer, UTR, CTCF site, and/or a gene expression control region.

[0692] In some embodiments, a Gene Writing system may be used to treat a healthy individual, e.g., as a preventative therapy. Gene Writing systems can, in some embodiments, be targeted to generate mutations, e.g., that have been shown to be protective towards a disease of interest. An exemplary list of such diseases and protective mutation targets can be found in Table 22.

[0693] In some embodiments, a nucleic acid component of a system provided by the invention a sequence (e.g., encoding the polypeptide or comprising a heterologous object sequence) is flanked by untranslated regions (UTRs) that modify protein expression levels. Various 5′ and 3′ UTRs can affect protein expression. For example, in some embodiments, the coding sequence may be preceded by a 5′ UTR that modifies RNA stability or protein translation. In some embodiments, the sequence may be followed by a 3′ UTR that modifies RNA stability or translation. In some embodiments, the sequence may be preceded by a 5′ UTR and followed by a 3′ UTR that modify RNA stability or translation. In some embodiments, the 5′ and/or 3′ UTR may be selected from the 5′ and 3′ UTRs of complement factor 3 (C3) (cactcctccccatcctctccctctgtccctctgtccctctgaccctgcactgtcccagcacc (SEQ ID NO: 274)) or orosomucoid 1 (ORM1) (caggacacagccttggatcaggacagagacttgggggccatcctgcccctccaacccgacatgtgtacctcagctttttccctcacttgcat caataaagcttctgtgtttggaacagctaa (SEQ ID NO: 275)) (Asrani et al. RNA Biology 2018). In certain embodiments, the 5′ UTR is the 5′ UTR from C3 and the 3′ UTR is the 3′ UTR from ORM1.

[0694] In certain embodiments, a 5′ UTR and 3′ UTR for protein expression, e.g., mRNA (or DNA encoding the RNA) for a Gene Writer polypeptide or heterologous object sequence, comprise optimized expression sequences. In some embodiments, the 5′ UTR comprises GGGAAAUAAGAGAGAAAAGAAGAGUAAGAAGAAAUAUAAGAGCCACC (SEQ ID NO: 132) and/or the 3′ UTR comprising UGAUAAUAGGCUGGAGCCUCGGUGGCCAUGCUUCUUGCCCCUUGGGCCUCCCCCC AGCCCCUCCUCCCCUUCCUGCACCCGUACCCCCGUGGUCUUUGAAUAAAGUCUGA (SEQ ID NO: 133), e.g., as described in Richner et al. Cell 168(6): P1114-1125 (2017), the sequences of which are incorporated herein by reference.

[0695] In some embodiments, a 5′ and/or 3′ UTR may be selected to enhance protein expression. In some embodiments, a 5′ and/or 3′ UTR may be selected to modify protein expression such that overproduction inhibition is minimized. In some embodiments, UTRs are around a coding sequence, e.g., outside the coding sequence and in other embodiments proximal to the coding sequence. In some embodiments additional regulatory elements (e.g., miRNA binding sites, cis-regulatory sites) are included in the UTRs.

[0696] In some embodiments, an open reading frame (ORF) of a Gene Writer system, e.g., an ORF of an mRNA (or DNA encoding an mRNA) encoding a Gene Writer polypeptide or one or more ORFs of an mRNA (or DNA encoding an mRNA) of a heterologous object sequence, is flanked by a 5′ and/or 3′ untranslated region (UTR) that enhances the expression thereof. In some embodiments, the 5′ UTR of an mRNA component (or transcript produced from a DNA component) of the system comprises the sequence 5′-GGGAAAUAAGAGAGAAAAGAAGAGUAAGAAGAAAUAUAAGAGCCACC-3′ (SEQ ID NO: 132). In some embodiments, the 3′ UTR of an mRNA component (or transcript produced from a DNA component) of the system comprises the sequence 5′-UGAUAAUAGGCUGGAGCCUCGGUGGCCAUGCUUCUUGCCCCUUGGGCCUCCCCCC AGCCCCUCCUCCCCUUCCUGCACCCGUACCCCCGUGGUCUUUGAAUAAAGUCUGA-3′ (SEQ ID NO: 133). This combination of 5′ UTR and 3′ UTR has been shown to result in desirable expression of an operably linked ORF by Richner et al. Cell 168(6): P1114-1125 (2017), the teachings and sequences of which are incorporated herein by reference. In some embodiments, a system described herein comprises a DNA encoding a transcript, wherein the DNA comprises the corresponding 5′ UTR and 3′ UTR sequences, with T substituting for U in the above-listed sequence). In some embodiments, a DNA vector used to produce an RNA component of the system further comprises a promoter upstream of the 5′ UTR for initiating in vitro transcription, e.g., a T7, T3, or SP6 promoter. The 5′ UTR above begins with GGG, which is a suitable start for optimizing transcription using T7 RNA polymerase. For tuning transcription levels and altering the transcription start site nucleotides to fit alternative 5′ UTRs, the teachings of Davidson et al. Pac Symp Biocomput 433-443 (2010) describe T7 promoter variants, and the methods of discovery thereof, that fulfill both of these traits.

### 1.1.2 Viral Vectors and Components Thereof

[0697] Viruses are a useful source of delivery vehicles for the systems described herein, in addition to a source of relevant enzymes or domains as described herein, e.g., as sources of polymerases and polymerase functions used herein, e.g., DNA-dependent DNA polymerase, RNA-dependent RNA polymerase, RNA-dependent DNA polymerase, DNA-dependent RNA polymerase, reverse transcriptase. Some enzymes, e.g., reverse transcriptases, may have multiple activities, e.g., be capable of both RNA-dependent DNA polymerization and DNA-dependent DNA polymerization, e.g., first and second strand synthesis. In some embodiments, the virus used as a Gene Writer delivery system or a source of components thereof may be selected from a group as described by Baltimore Bacteriol Rev 35(3):235-241 (1971).

[0698] In some embodiments, the virus is selected from a Group I virus, e.g., is a DNA virus and packages dsDNA into virions. In some embodiments, the Group I virus is selected from, e.g., Adenoviruses, Herpesviruses, Poxviruses.

[0699] In some embodiments, the virus is selected from a Group II virus, e.g., is a DNA virus and packages ssDNA into virions. In some embodiments, the Group II virus is selected from, e.g., Parvoviruses. In some embodiments, the parvovirus is a dependoparvovirus, e.g., an adeno-associated virus (AAV).

[0700] In some embodiments, the virus is selected from a Group III virus, e.g., is an RNA virus and packages dsRNA into virions. In some embodiments, the Group III virus is selected from, e.g., Reoviruses. In some embodiments, one or both strands of the dsRNA contained in such virions is a coding molecule able to serve directly as mRNA upon transduction into a host cell, e.g., can be directly translated into protein upon transduction into a host cell without requiring any intervening nucleic acid replication or polymerization steps.

[0701] In some embodiments, the virus is selected from a Group IV virus, e.g., is an RNA virus and packages ssRNA(+) into virions. In some embodiments, the Group IV virus is selected from, e.g., Coronaviruses, Picornaviruses, Togaviruses. In some embodiments, the ssRNA(+) contained in such virions is a coding molecule able to serve directly as mRNA upon transduction into a host cell, e.g., can be directly translated into protein upon transduction into a host cell without requiring any intervening nucleic acid replication or polymerization steps.

[0702] In some embodiments, the virus is selected from a Group V virus, e.g., is an RNA virus and packages ssRNA(−) into virions. In some embodiments, the Group V virus is selected from, e.g., Orthomyxoviruses, Rhabdoviruses. In some embodiments, an RNA virus with an ssRNA(−) genome also carries an enzyme inside the virion that is transduced to host cells with the viral genome, e.g., an RNA-dependent RNA polymerase, capable of copying the ssRNA(−) into ssRNA(+) that can be translated directly by the host.

[0703] In some embodiments, the virus is selected from a Group VI virus, e.g., is a retrovirus and packages ssRNA(+) into virions. In some embodiments, the Group VI virus is selected from, e.g., Retroviruses. In some embodiments, the retrovirus is a lentivirus, e.g., HIV-1, HIV-2, SIV, BIV. In some embodiments, the retrovirus is a spumavirus, e.g., a foamy virus, e.g., HFV, SFV, BFV. In some embodiments, the ssRNA(+) contained in such virions is a coding molecule able to serve directly as mRNA upon transduction into a host cell, e.g., can be directly translated into protein upon transduction into a host cell without requiring any intervening nucleic acid replication or polymerization steps. In some embodiments, the ssRNA(+) is first reverse transcribed and copied to generate a dsDNA genome intermediate from which mRNA can be transcribed in the host cell. In some embodiments, an RNA virus with an ssRNA(+) genome also carries an enzyme inside the virion that is transduced to host cells with the viral genome, e.g., an RNA-dependent DNA polymerase, capable of copying the ssRNA(+) into dsDNA that can be transcribed into mRNA and translated by the host. In some embodiments, the reverse transcriptase from a Group VI retrovirus is incorporated as the reverse transcriptase domain of a Gene Writer polypeptide.

[0704] In some embodiments, the virus is selected from a Group VII virus, e.g., is a retrovirus and packages dsRNA into virions. In some embodiments, the Group VII virus is selected from, e.g., Hepadnaviruses. In some embodiments, one or both strands of the dsRNA contained in such virions is a coding molecule able to serve directly as mRNA upon transduction into a host cell, e.g., can be directly translated into protein upon transduction into a host cell without requiring any intervening nucleic acid replication or polymerization steps. In some embodiments, one or both strands of the dsRNA contained in such virions is first reverse transcribed and copied to generate a dsDNA genome intermediate from which mRNA can be transcribed in the host cell. In some embodiments, an RNA virus with a dsRNA genome also carries an enzyme inside the virion that is transduced to host cells with the viral genome, e.g., an RNA-dependent DNA polymerase, capable of copying the dsRNA into dsDNA that can be transcribed into mRNA and translated by the host. In some embodiments, the reverse transcriptase from a Group VII retrovirus is incorporated as the reverse transcriptase domain of a Gene Writer polypeptide.

[0705] In some embodiments, virions used to deliver nucleic acid in this invention may also carry enzymes involved in the process of Gene Writing. For example, a retroviral virion may contain a reverse transcriptase domain that is delivered into a host cell along with the nucleic acid. In some embodiments, an RNA template may be associated with a Gene Writer polypeptide within a virion, such that both are co-delivered to a target cell upon transduction of the nucleic acid from the viral particle. In some embodiments, the nucleic acid in a virion may comprise DNA, e.g., linear ssDNA, linear dsDNA, circular ssDNA, circular dsDNA, minicircle DNA, dbDNA, ceDNA. In some embodiments, the nucleic acid in a virion may comprise RNA, e.g., linear ssRNA, linear dsRNA, circular ssRNA, circular dsRNA. In some embodiments, a viral genome may circularize upon transduction into a host cell, e.g., a linear ssRNA molecule may undergo a covalent linkage to form a circular ssRNA, a linear dsRNA molecule may undergo a covalent linkage to form a circular dsRNA or one or more circular ssRNA. In some embodiments, a viral genome may replicate by rolling circle replication in a host cell. In some embodiments, a viral genome may comprise a single nucleic acid molecule, e.g., comprise a non-segmented genome. In some embodiments, a viral genome may comprise two or more nucleic acid molecules, e.g., comprise a segmented genome. In some embodiments, a nucleic acid in a virion may be associated with one or proteins. In some embodiments, one or more proteins in a virion may be delivered to a host cell upon transduction. In some embodiments, a natural virus may be adapted for nucleic acid delivery by the addition of virion packaging signals to the target nucleic acid, wherein a host cell is used to package the target nucleic acid containing the packaging signals.

[0706] In some embodiments, a virion used as a delivery vehicle may comprise a commensal human virus. In some embodiments, a virion used as a delivery vehicle may comprise an anellovirus, the use of which is described in WO2018232017A1, which is incorporated herein by reference in its entirety.

### Adeno-Associated Viruses

[0707] In some embodiments, the virus is an adeno-associated virus (AAV). In some embodiments, the AAV genome comprises two genes that encode four replication proteins and three capsid proteins, respectively. In some embodiments, the genes are flanked on either side by 145-bp inverted terminal repeats (ITRs). In some embodiments, the virion comprises up to three capsid proteins (Vp1, Vp2, and/or Vp3), e.g., produced in a 1:1:10 ratio. In some embodiments, the capsid proteins are produced from the same open reading frame and/or from differential splicing (Vp1) and alternative translational start sites (Vp2 and Vp3, respectively). Generally, Vp3 is the most abundant subunit in the virion and participates in receptor recognition at the cell surface defining the tropism of the virus. In some embodiments, Vp1 comprises a phospholipase domain, e.g., which functions in viral infectivity, in the N-terminus of Vp1.

[0708] In some embodiments, packaging capacity of the viral vectors limits the size of the base editor that can be packaged into the vector. For example, the packaging capacity of the AAVs can be about 4.5 kb (e.g., about 3.0, 3.5, 4.0, 4.5, 5.0, 5.5, or 6.0 kb), e.g., including one or two inverted terminal repeats (ITRs), e.g., 145 base ITRs.

[0709] In some embodiments, recombinant AAV (rAAV) comprises cis-acting 145-bp ITRs flanking vector transgene cassettes, e.g., providing up to 4.5 kb for packaging of foreign DNA. Subsequent to infection, rAAV can, in some instances, express a fusion protein of the invention and persist without integration into the host genome by existing episomally in circular head-to-tail concatemers. rAAV can be used, for example, in vitro and in vivo. In some embodiments, AAV-mediated gene delivery requires that the length of the coding sequence of the gene is equal or greater in size than the wild-type AAV genome.

[0710] AAV delivery of genes that exceed this size and/or the use of large physiological regulatory elements can be accomplished, for example, by dividing the protein(s) to be delivered into two or more fragments. In some embodiments, the N-terminal fragment is fused to a split intein-N. In some embodiments, the C-terminal fragment is fused to a split intein-C. In embodiments, the fragments are packaged into two or more AAV vectors.

[0711] In some embodiments, dual AAV vectors are generated by splitting a large transgene expression cassette in two separate halves (5 and 3 ends, or head and tail), e.g., wherein each half of the cassette is packaged in a single AAV vector (of <5 kb). The re-assembly of the full-length transgene expression cassette can, in some embodiments, then be achieved upon co-infection of the same cell by both dual AAV vectors. In some embodiments, co-infection is followed by one or more of: (1) homologous recombination (HR) between 5 and 3 genomes (dual AAV overlapping vectors); (2) ITR-mediated tail-to-head concatemerization of 5 and 3 genomes (dual AAV trans-splicing vectors); and/or (3) a combination of these two mechanisms (dual AAV hybrid vectors). In some embodiments, the use of dual AAV vectors in vivo results in the expression of full-length proteins. In some embodiments, the use of the dual AAV vector platform represents an efficient and viable gene transfer strategy for transgenes of greater than about 4.0, 4.1, 4.2, 4.3, 4.4, 4.5, 4.6, 4.7, 4.8, 4.9, or 5.0 kb in size. In some embodiments, AAV vectors can also be used to transduce cells with target nucleic acids, e.g., in the in vitro production of nucleic acids and peptides. In some embodiments, AAV vectors can be used for in vivo and ex vivo gene therapy procedures (see, e.g., West et al., Virology 160:38-47 (1987); U.S. Pat. No. 4,797,368; WO 93/24641; Kotin, Human Gene Therapy 5:793-801 (1994); Muzyczka, J. Clin. Invest. 94:1351 (1994); each of which is incorporated herein by reference in their entirety). The construction of recombinant AAV vectors is described in a number of publications, including U.S. Pat. No. 5,173,414; Tratschin et al., Mol. Cell. Biol. 5:3251-3260 (1985); Tratschin, et al., Mol. Cell. Biol. 4:2072-2081 (1984); Hermonat & Muzyczka, PNAS 81:6466-6470 (1984); and Samulski et al., J. Virol. 63:03822-3828 (1989) (incorporated by reference herein in their entirety).

[0712] In some embodiments, a Gene Writer described herein (e.g., with or without one or more guide nucleic acids) can be delivered using AAV, lentivirus, adenovirus or other plasmid or viral vector types, in particular, using formulations and doses from, for example, U.S. Pat. No. 8,454,972 (formulations, doses for adenovirus), U.S. Pat. No. 8,404,658 (formulations, doses for AAV) and U.S. Pat. No. 5,846,946 (formulations, doses for DNA plasmids) and from clinical trials and publications regarding the clinical trials involving lentivirus, AAV and adenovirus. For example, for AAV, the route of administration, formulation and dose can be as described in U.S. Pat. No. 8,454,972 and as in clinical trials involving AAV. For Adenovirus, the route of administration, formulation and dose can be as described in U.S. Pat. No. 8,404,658 and as in clinical trials involving adenovirus. For plasmid delivery, the route of administration, formulation and dose can be as described in U.S. Pat. No. 5,846,946 and as in clinical studies involving plasmids. Doses can be based on or extrapolated to an average 70 kg individual (e.g. a male adult human), and can be adjusted for patients, subjects, mammals of different weight and species. Frequency of administration is within the ambit of the medical or veterinary practitioner (e.g., physician, veterinarian), depending on usual factors including the age, sex, general health, other conditions of the patient or subject and the particular condition or symptoms being addressed. In some embodiments, the viral vectors can be injected into the tissue of interest. For cell-type specific Gene Writing, the expression of the Gene Writer and optional guide nucleic acid can, in some embodiments, be driven by a cell-type specific promoter.

[0713] In some embodiments, AAV allows for low toxicity, for example, due to the purification method not requiring ultracentrifugation of cell particles that can activate the immune response. In some embodiments, AAV allows low probability of causing insertional mutagenesis, for example, because it does not substantially integrate into the host genome.

[0714] In some embodiments, AAV has a packaging limit of about 4.4, 4.5, 4.6, 4.7, or 4.75 kb. In some embodiments, a Gene Writer, promoter, and transcription terminator can fit into a single viral vector. SpCas9 (4.1 kb) may, in some instances, be difficult to package into AAV. Therefore, in some embodiments, a Gene Writer is used that is shorter in length than other Gene Writers or base editors. In some embodiments, the Gene Writers are less than about 4.5 kb, 4.4 kb, 4.3 kb, 4.2 kb, 4.1 kb, 4 kb, 3.9 kb, 3.8 kb, 3.7 kb, 3.6 kb, 3.5 kb, 3.4 kb, 3.3 kb, 3.2 kb, 3.1 kb, 3 kb, 2.9 kb, 2.8 kb, 2.7 kb, 2.6 kb, 2.5 kb, 2 kb, or 1.5 kb.

[0715] An AAV can be AAV1, AAV2, AAV5 or any combination thereof. In some embodiments, the type of AAV is selected with respect to the cells to be targeted; e.g., AAV serotypes 1, 2, 5 or a hybrid capsid AAV1, AAV2, AAV5 or any combination thereof can be selected for targeting brain or neuronal cells; or AAV4 can be selected for targeting cardiac tissue. In some embodiments, AAV8 is selected for delivery to the liver. Exemplary AAV serotypes as to these cells are described, for example, in Grimm, D. et al., J. Virol. 82: 5887-5911 (2008) (incorporated herein by reference in its entirety). In some embodiments, AAV refers all serotypes, subtypes, and naturally-occurring AAV as well as recombinant AAV. AAV may be used to refer to the virus itself or a derivative thereof. In some embodiments, AAV includes AAV1, AAV2, AAV3, AAV3B, AAV4, AAV5, AAV6, AAV6.2, AAV7, AAVrh.64R1, AAVhu.37, AAVrh.8, AAVrh.32.33, AAV8, AAV9, AAV-DJ, AAV2/8, AAVrhlO, AAVLK03, AV10, AAV11, AAV 12, rhlO, and hybrids thereof, avian AAV, bovine AAV, canine AAV, equine AAV, primate AAV, nonprimate AAV, and ovine AAV. The genomic sequences of various serotypes of AAV, as well as the sequences of the native terminal repeats (TRs), Rep proteins, and capsid subunits are known in the art. Such sequences may be found in the literature or in public databases such as GenBank. Additional exemplary AAV serotypes are listed in Table 36.

TABLE 36
Exemplary AAV serotypes.

| Target Tissue | Vehicle | Reference |
|---|---|---|
| Liver | AAV (AAV8¹, AAVrh.8¹, AAVhu.37¹, AAV2/8, AAV2/rh10², | 1. Wang et al., Mol. Ther. 18, 118-25 (2010) |
| | AAV9, AAV2, NP40³, NP59^{2, 3}, AAV3B⁵, AAV-DJ⁴, AAV- | 2. Ginn et al., JHEP Reports, 100065 (2019) |
| | LK01⁴, AAV-LK02⁴, AAV-LK03⁴, AAV-LK19⁴ Adenovirus | 3. Paulk et al., Mol. Ther. 26, 289-303 (2018). |
| | (Ad5, HC-AdV⁶) | 4. L. Lisowski et al., Nature. 506, 382-6 (2014). |
| | | 5. L. Wang et al., Mol. Ther. 23, 1877-87 (2015). |
| | | 6. Hausl Mol Ther (2010) |
| Lung | AAV (AAV4, AAV5, AAV6¹, AAV9, H22²) Adenovirus | 1. Duncan et al., Mol Ther Methods Clin Dev (2018) |
| | (Ad5, Ad3, Ad21, Ad14)³ | 2. Cooney et al., Am J Respir Cell Mol Biol (2019) |
| | | 3. Li et al., Mol Ther Methods Clin Dev (2019) |
| Skin | AAV (AAV6¹, AAV-LK19²) | 1. Petek et al., Mol. Ther. (2010) |
| | | 2. L. Lisowski et al., Nature. 506, 382-6 (2014). |
| HSCs | Adenovirus (HDAd5/35⁺⁺) | Wang et al. Blood Adv (2019) |

[0716] In some embodiments, a pharmaceutical composition (e.g., comprising an AAV as described herein) has less than 1000 empty capsids, less than 8% empty capsids, less than 7% empty capsids, less than 500 empty capsids, less than 3% empty capsids, or less than 10% empty capsids. In some embodiments, the pharmaceutical composition has less than about 50% empty capsids. In some embodiments, the number of empty capsids is below the limit of detection. In some embodiments, it is advantageous for the pharmaceutical composition to have low amounts of empty capsids, e.g., because empty capsids may generate an adverse response (e.g., immune response, inflammatory response, liver response, and/or cardiac response), e.g., with little or no substantial therapeutic benefit.

[0717] In some embodiments, the residual host cell protein (rHCP) in the pharmaceutical composition is less than or equal to 100 ng/ml rHCP per 1×10¹³ vg/ml, e.g., less than or equal to 40 ng/ml rHCP per 1×10¹³ vg/ml or 1-50 ng/ml rHCP per 1×10¹³ vg/ml. In some embodiments, the pharmaceutical composition comprises less than 10 ng rHCP per 1.0×10¹³ vg, or less than 5 ng rHCP per 1.0×10¹³ vg, less than 4 ng rHCP per 1.0×10¹³ vg, or less than 3 ng rHCP per 1.0×10¹³ vg, or any concentration in between. In some embodiments, the residual host cell DNA (hcDNA) in the pharmaceutical composition is less than or equal to 5×10⁶ pg/ml hcDNA per 1×10¹³ vg/ml, less than or equal to 1.2×10⁶ pg/ml hcDNA per 1×10¹³ vg/ml, or 1×10⁵ pg/ml hcDNA per 1×10¹³ vg/ml. In some embodiments, the residual host cell DNA in said pharmaceutical composition is less than 5.0×10⁵ pg per 1×10¹³ vg, less than 2.0×10⁵ pg per 1.0×10¹³ vg, less than 1.1×10⁵ pg per 1.0×10¹³ vg, less than 1.0×10⁵ pg hcDNA per 1.0×10¹³ vg, less than 0.9×10⁵ pg hcDNA per 1.0×10¹³ vg, less than 0.8×10⁵ pg hcDNA per 1.0×10¹³ vg, or any concentration in between.

[0718] In some embodiments, the residual plasmid DNA in the pharmaceutical composition is less than or equal to 1.7×10⁵ pg/ml per 1.0×10¹³ vg/ml, or 1×10⁵ pg/ml per 1×1.0×10¹³ vg/ml, or 1.7×10⁶ pg/ml per 1.0×10¹³ vg/ml. In some embodiments, the residual DNA plasmid in the pharmaceutical composition is less than 10.0×10⁵ pg by 1.0×10¹³ vg, less than 8.0×10⁵ pg by 1.0×10¹³ vg or less than 6.8×10⁵ pg by 1.0×10¹³ vg. In embodiments, the pharmaceutical composition comprises less than 0.5 ng per 1.0×10¹³ vg, less than 0.3 ng per 1.0×10¹³ vg, less than 0.22 ng per 1.0×10¹³ vg or less than 0.2 ng per 1.0×10¹³ vg or any intermediate concentration of bovine serum albumin (BSA). In embodiments, the benzonase in the pharmaceutical composition is less than 0.2 ng by 1.0×10¹³ vg, less than 0.1 ng by 1.0×10¹³ vg, less than 0.09 ng by 1.0×10¹³ vg, less than 0.08 ng by 1.0×10¹³ vg or any intermediate concentration. In embodiments, Poloxamer 188 in the pharmaceutical composition is about 10 to 150 ppm, about 15 to 100 ppm or about 20 to 80 ppm. In embodiments, the cesium in the pharmaceutical composition is less than 50 pg/g (ppm), less than 30 pg/g (ppm) or less than 20 pg/g (ppm) or any intermediate concentration.

[0719] In embodiments, the pharmaceutical composition comprises total impurities, e.g., as determined by SDS-PAGE, of less than 10%, less than 8%, less than 7%, less than 6%, less than 5%, less than 4%, less than 3%, less than 2%, or any percentage in between. In embodiments, the total purity, e.g., as determined by SDS-PAGE, is greater than 90%, greater than 92%, greater than 93%, greater than 94%, greater than 95%, greater than 96%, greater than 97%, greater than 98%, or any percentage in between. In embodiments, no single unnamed related impurity, e.g., as measured by SDS-PAGE, is greater than 5%, greater than 4%, greater than 3% or greater than 2%, or any percentage in between. In embodiments, the pharmaceutical composition comprises a percentage of filled capsids relative to total capsids (e.g., peak 1+peak 2 as measured by analytical ultracentrifugation) of greater than 85%, greater than 86%, greater than 87%, greater than 88%, greater than 89%, greater than 90%, greater than 91%, greater than 91.9%, greater than 92%, greater than 93%, or any percentage in between. In embodiments of the pharmaceutical composition, the percentage of filled capsids measured in peak 1 by analytical ultracentrifugation is 20-80%, 25-75%, 30-75%, 35-75%, or 37.4-70.3%. In embodiments of the pharmaceutical composition, the percentage of filled capsids measured in peak 2 by analytical ultracentrifugation is 20-80%, 20-70%, 22-65%, 24-62%, or 24.9-60.1%.

[0720] In one embodiment, the pharmaceutical composition comprises a genomic titer of 1.0 to 5.0×10¹³ vg/mL, 1.2 to 3.0×10¹³ vg/mL or 1.7 to 2.3×10¹³ vg/ml. In one embodiment, the pharmaceutical composition exhibits a biological load of less than 5 CFU/mL, less than 4 CFU/mL, less than 3 CFU/mL, less than 2 CFU/mL or less than 1 CFU/mL or any intermediate contraction. In embodiments, the amount of endotoxin according to USP, for example, USP <85> (incorporated by reference in its entirety) is less than 1.0 EU/mL, less than 0.8 EU/mL or less than 0.75 EU/mL. In embodiments, the osmolarity of a pharmaceutical composition according to USP, for example, USP <785> (incorporated by reference in its entirety) is 350 to 450 mOsm/kg, 370 to 440 mOsm/kg or 390 to 430 mOsm/kg. In embodiments, the pharmaceutical composition contains less than 1200 particles that are greater than 25 m per container, less than 1000 particles that are greater than 25 m per container, less than 500 particles that are greater than 25 m per container or any intermediate value. In embodiments, the pharmaceutical composition contains less than 10,000 particles that are greater than 10 m per container, less than 8000 particles that are greater than 10 m per container or less than 600 particles that are greater than 10 pm per container.

[0721] In one embodiment, the pharmaceutical composition has a genomic titer of 0.5 to 5.0×10¹³ vg/mL, 1.0 to 4.0×10¹³ vg/mL, 1.5 to 3.0×10¹³ vg/ml or 1.7 to 2.3×10¹³ vg/ml. In one embodiment, the pharmaceutical composition described herein comprises one or more of the following: less than about 0.09 ng benzonase per 1.0×10¹³ vg, less than about 30 pg/g (ppm) of cesium, about 20 to 80 ppm Poloxamer 188, less than about 0.22 ng BSA per 1.0×10¹³ vg, less than about 6.8×10⁵ pg of residual DNA plasmid per 1.0×10¹³ vg, less than about 1.1×10⁵ pg of residual hcDNA per 1.0×10¹³ vg, less than about 4 ng of rHCP per 1.0×10¹³ vg, pH 7.7 to 8.3, about 390 to 430 mOsm/kg, less than about 600 particles that are >25 m in size per container, less than about 6000 particles that are >10 m in size per container, about 1.7×10¹³-2.3×10¹³ vg/mL genomic titer, infectious titer of about 3.9×10⁸ to 8.4×10¹⁰ IU per 1.0×10¹³ vg, total protein of about 100-300 pg per 1.0×10¹³ vg, mean survival of >24 days in A7SMA mice with about 7.5×10¹³ vg/kg dose of viral vector, about 70 to 130% relative potency based on an in vitro cell based assay and/or less than about 5% empty capsid. In various embodiments, the pharmaceutical compositions described herein comprise any of the viral particles discussed here, retain a potency of between ±20%, between +15%, between ±10% or within +5% of a reference standard. In some embodiments, potency is measured using a suitable in vitro cell assay or in vivo animal model.

[0722] Additional methods of preparation, characterization, and dosing AAV particles are taught in WO2019094253, which is incorporated herein by reference in its entirety.

[0723] Additional rAAV constructs that can be employed consonant with the invention include those described in Wang et al 2019, available at: //doi.org/10.1038/s41573-019-0012-9, including Table 1 thereof, which is incorporated by reference in its entirety.

### 1.1.3 AAV Administration

[0724] In some embodiments, an adeno-associated virus (AAV) is used in conjunction with the system, template nucleic acid, and/or polypeptide described herein. In some embodiments, an AAV is used to deliver, administer, or package the system, template nucleic acid, and/or polypeptide described herein. In some embodiments, the AAV is a recombinant AAV (rAAV).

[0725] In some embodiments, a system comprises (a) a polypeptide described herein or a nucleic acid encoding the same, (b) a template nucleic acid (e.g., template RNA) described herein, and (c) one or more first tissue-specific expression-control sequences specific to the target tissue, wherein the one or more first tissue-specific expression-control sequences specific to the target tissue are in operative association with (a), (b), or (a) and (b), wherein, when associated with (a), (a) comprises a nucleic acid encoding the polypeptide.

[0726] In some embodiments, a system described herein further comprises a first recombinant adeno-associated virus (rAAV) capsid protein; wherein the at least one of (a) or (b) is associated with the first rAAV capsid protein, wherein at least one of (a) or (b) is flanked by AAV inverted terminal repeats (ITRs).

[0727] In some embodiments, (a) and (b) are associated with the first rAAV capsid protein.

[0728] In some embodiments, (a) and (b) are on a single nucleic acid.

[0729] In some embodiments, the system further comprises a second rAAV capsid protein, wherein at least one of (a) or (b) is associated with the second rAAV capsid protein, and wherein the at least one of (a) or (b) associated with the second rAAV capsid protein is different from the at least one of (a) or (b) is associated with the first rAAV capsid protein.

[0730] In some embodiments, the at least one of (a) or (b) is associated with the first or second rAAV capsid protein is dispersed in the interior of the first or second rAAV capsid protein, which first or second rAAV capsid protein is in the form of an AAV capsid particle.

[0731] In some embodiments, the system further comprises a nanoparticle, wherein the nanoparticle is associated with at least one of (a) or (b).

[0732] In some embodiments, (a) and (b), respectively are associated with: a) a first rAAV capsid protein and a second rAAV capsid protein; b) a nanoparticle and a first rAAV capsid protein; c) a first rAAV capsid protein; d) a first adenovirus capsid protein; e) a first nanoparticle and a second nanoparticle; or f) a first nanoparticle.

[0733] Viral vectors are useful for delivering all or part of a system provided by the invention, e.g., for use in methods provided by the invention. Systems derived from different viruses have been employed for the delivery of polypeptides, nucleic acids, or transposons; for example: integrase-deficient lentivirus, adenovirus, adeno-associated virus (AAV), herpes simplex virus, and baculovirus (reviewed in Hodge et al. Hum Gene Ther 2017; Narayanavari et al. Crit Rev Biochem Mol Biol 2017; Boehme et al. Curr Gene Ther 2015).

[0734] Adenoviruses are common viruses that have been used as gene delivery vehicles given well-defined biology, genetic stability, high transduction efficiency, and ease of large-scale production (see, for example, review by Lee et al. Genes & Diseases 2017). They possess linear dsDNA genomes and come in a variety of serotypes that differ in tissue and cell tropisms. In order to prevent replication of infectious virus in recipient cells, adenovirus genomes used for packaging are deleted of some or all endogenous viral proteins, which are provided in trans in viral production cells. This renders the genomes helper-dependent, meaning they can only be replicated and packaged into viral particles in the presence of the missing components provided by so-called helper functions. A helper-dependent adenovirus system with all viral ORFs removed may be compatible with packaging foreign DNA of up to −37 kb (Parks et al. J Virol 1997). In some embodiments, an adenoviral vector is used to deliver DNA corresponding to the polypeptide or template component of the Gene Writing™ system, or both are contained on separate or the same adenoviral vector. In some embodiments, the adenovirus is a helper-dependent adenovirus (HD-AdV) that is incapable of self-packaging. In some embodiments, the adenovirus is a high-capacity adenovirus (HC-AdV) that has had all or a substantial portion of endogenous viral ORFs deleted, while retaining the necessary sequence components for packaging into adenoviral particles. For this type of vector, the only adenoviral sequences required for genome packaging are noncoding sequences: the inverted terminal repeats (ITRs) at both ends and the packaging signal at the 5′-end (Jager et al. Nat Protoc 2009). In some embodiments, the adenoviral genome also comprises stuffer DNA to meet a minimal genome size for optimal production and stability (see, for example, Hausl et al. Mol Ther 2010). Adenoviruses have been used in the art for the delivery of transposons to various tissues. In some embodiments, an adenovirus is used to deliver a Gene Writing™ system to the liver.

[0735] In some embodiments, an adenovirus is used to deliver a Gene Writing™ system to HSCs, e.g., HDAd5/35++. HDAd5/35++ is an adenovirus with modified serotype 35 fibers that de-target the vector from the liver (Wang et al. Blood Adv 2019). In some embodiments, the adenovirus that delivers a Gene Writing™ system to HSCs utilizes a receptor that is expressed specifically on primitive HSCs, e.g., CD46.

[0736] Adeno-associated viruses (AAV) belong to the parvoviridae family and more specifically constitute the dependoparvovirus genus. The AAV genome is composed of a linear single-stranded DNA molecule which contains approximately 4.7 kilobases (kb) and consists of two major open reading frames (ORFs) encoding the non-structural Rep (replication) and structural Cap (capsid) proteins. A second ORF within the cap gene was identified that encodes the assembly-activating protein (AAP). The DNAs flanking the AAV coding regions are two cis-acting inverted terminal repeat (ITR) sequences, approximately 145 nucleotides in length, with interrupted palindromic sequences that can be folded into energetically stable hairpin structures that function as primers of DNA replication. In addition to their role in DNA replication, the ITR sequences have been shown to be involved in viral DNA integration into the cellular genome, rescue from the host genome or plasmid, and encapsidation of viral nucleic acid into mature virions (Muzyczka, (1992) Curr. Top. Micro. Immunol. 158:97-129). In some embodiments, one or more Gene Writing™ nucleic acid components is flanked by ITRs derived from AAV for viral packaging. See, e.g., WO2019113310.

[0737] In some embodiments, one or more components of the Gene Writing™ system are carried via at least one AAV vector. In some embodiments, the at least one AAV vector is selected for tropism to a particular cell, tissue, organism. In some embodiments, the AAV vector is pseudotyped, e.g., AAV2/8, wherein AAV2 describes the design of the construct but the capsid protein is replaced by that from AAV8. It is understood that any of the described vectors could be pseudotype derivatives, wherein the capsid protein used to package the AAV genome is derived from that of a different AAV serotype. In some embodiments, an AAV to be employed for Gene Writing™ may be evolved for novel cell or tissue tropism as has been demonstrated in the literature (e.g., Davidsson et al. Proc Natl Acad Sci USA 2019).

[0738] In some embodiments, the AAV delivery vector is a vector which has two AAV inverted terminal repeats (ITRs) and a nucleotide sequence of interest (for example, a sequence coding for a Gene Writer™ polypeptide or a DNA template, or both), each of said ITRs having an interrupted (or noncontiguous) palindromic sequence, i.e., a sequence composed of three segments: a first segment and a last segment that are identical when read 5′→3′ but hybridize when placed against each other, and a segment that is different that separates the identical segments. Such sequences, notably the ITRs, form hairpin structures. See, for example, WO2012123430.

[0739] Conventionally, AAV virions with capsids are produced by introducing a plasmid or plasmids encoding the rAAV or scAAV genome, Rep proteins, and Cap proteins (Grimm et al., 1998). Upon introduction of these helper plasmids in trans, the AAV genome is “rescued” (i.e., released and subsequently recovered) from the host genome, and is further encapsidated to produce infectious AAV. In some embodiments, one or more Gene Writing™ nucleic acids are packaged into AAV particles by introducing the ITR-flanked nucleic acids into a packaging cell in conjunction with the helper functions.

[0740] In some embodiments, the AAV genome is a so called self-complementary genome (referred to as scAAV), such that the sequence located between the ITRs contains both the desired nucleic acid sequence (e.g., DNA encoding the Gene Writer™ polypeptide or template, or both) in addition to the reverse complement of the desired nucleic acid sequence, such that these two components can fold over and self-hybridize. In some embodiments, the self-complementary modules are separated by an intervening sequence that permits the DNA to fold back on itself, e.g., forms a stem-loop. An scAAV has the advantage of being poised for transcription upon entering the nucleus, rather than being first dependent on ITR priming and second-strand synthesis to form dsDNA. In some embodiments, one or more Gene Writing™ components is designed as an scAAV, wherein the sequence between the AAV ITRs contains two reverse complementing modules that can self-hybridize to create dsDNA.

[0741] In some embodiments, nucleic acid (e.g., encoding a polypeptide, or a template, or both) delivered to cells is closed-ended, linear duplex DNA (CELiD DNA or ceDNA). In some embodiments, ceDNA is derived from the replicative form of the AAV genome (Li et al. PLoS One 2013). In some embodiments, the nucleic acid (e.g., encoding a polypeptide, or a template DNA, or both) is flanked by ITRs, e.g., AAV ITRs, wherein at least one of the ITRs comprises a terminal resolution site and a replication protein binding site (sometimes referred to as a replicative protein binding site). In some embodiments, the ITRs are derived from an adeno-associated virus, e.g., AAV1, AAV2, AAV3, AAV4, AAV5, AAV6, AAV7, AAV8, AAV9, AAV10, AAV 11, AAV12, or a combination thereof. In some embodiments, the ITRs are symmetric. In some embodiments, the ITRs are asymmetric. In some embodiments, at least one Rep protein is provided to enable replication of the construct. In some embodiments, the at least one Rep protein is derived from an adeno-associated virus, e.g., AAV1, AAV2, AAV3, AAV4, AAV5, AAV6, AAV7, AAV8, AAV9, AAV10, AAV11, AAV12, or a combination thereof. In some embodiments, ceDNA is generated by providing a production cell with (i) DNA flanked by ITRs, e.g., AAV ITRs, and (ii) components required for ITR-dependent replication, e.g., AAV proteins Rep78 and Rep52 (or nucleic acid encoding the proteins). In some embodiments, ceDNA is free of any capsid protein, e.g., is not packaged into an infectious AAV particle. In some embodiments, ceDNA is formulated into LNPs (see, for example, WO2019051289A1). In some embodiments, the ceDNA vector consists of two self complementary sequences, e.g., asymmetrical or symmetrical or substantially symmetrical ITRs as defined herein, flanking said expression cassette, wherein the ceDNA vector is not associated with a capsid protein. In some embodiments, the ceDNA vector comprises two self-complementary sequences found in an AAV genome, where at least one ITR comprises an operative Rep-binding element (RBE) (also sometimes referred to herein as “RBS”) and a terminal resolution site (trs) of AAV or a functional variant of the RBE. See, for example, WO2019113310.

### Inteins

[0742] In some embodiments, as described in more detail below, Intein-N may be fused to the N-terminal portion of a first domain described herein, and intein-C may be fused to the C-terminal portion of a second domain described herein for the joining of the N-terminal portion to the C-terminal portion, thereby joining the first and second domains. In some embodiments, the first and second domains are each independent chosen from a DNA binding domain, an RNA binding domain, an RT domain, and an endonuclease domain.

[0743] As used herein, “intein” refers to a self-splicing protein intron (e.g., peptide), e.g., which ligates flanking N-terminal and C-terminal exteins (e.g., fragments to be joined). An intein may, in some instances, comprise a fragment of a protein that is able to excise itself and join the remaining fragments (the exteins) with a peptide bond in a process known as protein splicing. Inteins are also referred to as “protein introns.” The process of an intein excising itself and joining the remaining portions of the protein is herein termed “protein splicing” or “intein-mediated protein splicing.” In some embodiments, an intein of a precursor protein (an intein containing protein prior to intein-mediated protein splicing) comes from two genes. Such intein is referred to herein as a split intein (e.g., split intein-N and split intein-C). For example, in cyanobacteria, DnaE, the catalytic subunit a of DNA polymerase III, is encoded by two separate genes, dnaE-n and dnaE-c. The intein encoded by the dnaE-n gene may be herein referred as “intein-N.” The intein encoded by the dnaE-c gene may be herein referred as “intein-C.”

[0744] Use of inteins for joining heterologous protein fragments is described, for example, in Wood et al., J. Biol. Chem.289(21); 14512-9 (2014) (incorporated herein by reference in its entirety). For example, when fused to separate protein fragments, the inteins IntN and IntC may recognize each other, splice themselves out, and/or simultaneously ligate the flanking N- and C-terminal exteins of the protein fragments to which they were fused, thereby reconstituting a full-length protein from the two protein fragments.

[0745] In some embodiments, a synthetic intein based on the dnaE intein, the Cfa-N (e.g., split intein-N) and Cfa-C(e.g., split intein-C) intein pair, is used. Examples of such inteins have been described, e.g., in Stevens et al., J Am Chem Soc. 2016 Feb. 24; 138(7):2162-5 (incorporated herein by reference in its entirety). Non-limiting examples of intein pairs that may be used in accordance with the present disclosure include: Cfa DnaE intein, Ssp GyrB intein, Ssp DnaX intein, Ter DnaE3 intein, Ter ThyX intein, Rma DnaB intein and Cne Prp8 intein (e.g., as described in U.S. Pat. No. 8,394,604, incorporated herein by reference.

[0746] In some embodiments, Intein-N and intein-C may be fused to the N-terminal portion of the split Cas9 and the C-terminal portion of a split Cas9, respectively, for the joining of the N-terminal portion of the split Cas9 and the C-terminal portion of the split Cas9. For example, in some embodiments, an intein-N is fused to the C-terminus of the N-terminal portion of the split Cas9, i.e., to form a structure of N [N-terminal portion of the split Cas9]-[intein-N]˜C. In some embodiments, an intein-C is fused to the N-terminus of the C-terminal portion of the split Cas9, i.e., to form a structure of N-[intein-C]˜[C-terminal portion of the split Cas9]-C. The mechanism of intein-mediated protein splicing for joining the proteins the inteins are fused to (e.g., split Cas9) is described in Shah et al., Chem Sci. 2014; 5(1):446-461, incorporated herein by reference. Methods for designing and using inteins are known in the art and described, for example by WO2020051561, WO2014004336, WO2017132580, US20150344549, and US20180127780, each of which is incorporated herein by reference in their entirety.

[0747] In some embodiments, a split refers to a division into two or more fragments. In some embodiments, a split Cas9 protein or split Cas9 comprises a Cas9 protein that is provided as an N-terminal fragment and a C-terminal fragment encoded by two separate nucleotide sequences. The polypeptides corresponding to the N-terminal portion and the C-terminal portion of the Cas9 protein may be spliced to form a reconstituted Cas9 protein. In embodiments, the Cas9 protein is divided into two fragments within a disordered region of the protein, e.g., as described in Nishimasu et al., Cell, Volume 156, Issue 5, pp. 935-949, 2014, or as described in Jiang et al. (2016) Science 351: 867-871 and PDB file: 5F9R (each of which is incorporated herein by reference in its entirety). A disordered region may be determined by one or more protein structure determination techniques known in the art, including, without limitation, X-ray crystallography, NMR spectroscopy, electron microscopy (e.g., cryoEM), and/or in silico protein modeling. In some embodiments, the protein is divided into two fragments at any C, T, A, or S, e.g., within a region of SpCas9 between amino acids A292-G364, F445-K483, or E565-T637, or at corresponding positions in any other Cas9, Cas9 variant (e.g., nCas9, dCas9), or other napDNAbp. In some embodiments, protein is divided into two fragments at SpCas9 T310, T313, A456, S469, or C574. In some embodiments, the process of dividing the protein into two fragments is referred to as splitting the protein.

[0748] In some embodiments, a protein fragment ranges from about 2-1000 amino acids (e.g., between 2-10, 10-50, 50-100, 100-200, 200-300, 300-400, 400-500, 500-600, 600-700, 700-800, 800-900, or 900-1000 amino acids) in length. In some embodiments, a protein fragment ranges from about 5-500 amino acids (e.g., between 5-10, 10-50, 50-100, 100-200, 200-300, 300-400, or 400-500 amino acids) in length. In some embodiments, a protein fragment ranges from about 20-200 amino acids (e.g., between 20-30, 30-40, 40-50, 50-100, or 100-200 amino acids) in length.

[0749] In some embodiments, a portion or fragment of a Gene Writer (e.g., Cas9-R2Tg) is fused to an intein. The nuclease can be fused to the N-terminus or the C-terminus of the intein. In some embodiments, a portion or fragment of a fusion protein is fused to an intein and fused to an AAV capsid protein. The intein, nuclease and capsid protein can be fused together in any arrangement (e.g., nuclease-intein-capsid, intein-nuclease-capsid, capsid-intein-nuclease, etc.). In some embodiments, the N-terminus of an intein is fused to the C-terminus of a fusion protein and the C-terminus of the intein is fused to the N-terminus of an AAV capsid protein.

[0750] In some embodiments, an endonuclease domain (e.g., a nickase Cas9 domain) is fused to intein-N and a polypeptide comprising an RT domain is fused to an intein-C.

[0751] Exemplary nucleotide and amino acid sequences of interns are provided below:

DnaE Intein-N DNA:
(SEQ ID NO: 276)
TGCCTGTCATACGAAACCGAGATACTGACAGTAGAATATGGCCTTCTGCC
AATCGGGAAGATTGTGGAGAAACGGATAGAATGCACAGTTTACTCTGTCG
ATAACAATGGTAACATTTATACTCAGCCAGTTGCCCAGTGGCACGACCGG
GGAGAGCAGGAAGTATTCGAATACTGTCTGGAGGATGGAAGTCTCATTAG
GGCCACTAAGGACCACAAATTTATGACAGTCGATGGCCAGATGCTGCCTA
TAGACGAAATCTTTGAGCGAGAGTTGGACCTCATGCGAGTTGACAACCTT
CCTAAT
DnaE Intein-N Protein:
(SEQ ID NO: 277)
CLSYETEILTVEYGLLPIGKIVEKRIECTVYSVDNNGNIYTQPVAQWHDR
GEQEVFEYCLEDGSLIRATKDHKFMTVDGQMLPIDEIFERELDLMRVDNL
PN
DnaE Intein-C DNA:
(SEQ ID NO: 278)
ATGATCAAGATAGCTACAAGGAAGTATCTTGGCAAACAAAACGTTTATGA
TATTGGAGTCGAAAGAGATCACAACTTTGCTCTGAAGAACGGATTCATAG
CTTCTAAT
Intein-C:
(SEQ ID NO: 279)
MIKIATRKYLGKQNVYDIGVERDHNFALKNGFIASN
Cfa-N DNA:
(SEQ ID NO: 280)
TGCCTGTCTTATGATACCGAGATACTTACCGTTGAATATGGCTTCTTGCC
TATTGGAAAGATTGTCGAAGAGAGAATTGAATGCACAGTATATACTGTAG
ACAAGAATGGTTTCGTTTACACACAGCCCATTGCTCAATGGCACAATCGC
GGCGAACAAGAAGTATTTGAGTACTGTCTCGAGGATGGAAGCATCATACG
AGCAACTAAAGATCATAAATTCATGACCACTGACGGGCAGATGTTGCCAA
TAGATGAGATATTCGAGCGGGGCTTGGATCTCAAACAAGTGGATGGATTG
CCA
Cfa-N Protein:
(SEQ ID NO: 281)
CLSYDTEILTVEYGFLPIGKIVEERIECTVYTVDKNGFVYTQPIAQWHNR
GEQEVFEYCLEDGSIIRATKDHKFMTTDGQMLPIDEIFERGLDLKQVDGL
P
Cfa-C DNA:
(SEQ ID NO: 282)
ATGAAGAGGACTGCCGATGGATCAGAGTTTGAATCTCCCAAGAAGAAGAG
GAAAGTAAAGATAATATCTCGAAAAAGTCTTGGTACCCAAAATGTCTATG
ATATTGGAGTGGAGAAAGATCACAACTTCCTTCTCAAGAACGGTCTCGTA
GCCAGCAAC
Cfa-C Protein:
(SEQ ID NO: 283)
MKRTADGSEFESPKKKRKVKIISRKSLGTQNVYDIGVEKDHNFLLKNGLV
ASN

### Lipid Nanoparticles

[0752] The methods and systems provided by the invention, may employ any suitable carrier or delivery modality, including, in certain embodiments, lipid nanoparticles (LNPs). Lipid nanoparticles, in some embodiments, comprise one or more ionic lipids, such as non-cationic lipids (e.g., neutral or anionic, or zwitterionic lipids); one or more conjugated lipids (such as PEG-conjugated lipids or lipids conjugated to polymers described in Table 5 of WO2019217941; incorporated herein by reference in its entirety); one or more sterols (e.g., cholesterol); and, optionally, one or more targeting molecules (e.g., conjugated receptors, receptor ligands, antibodies); or combinations of the foregoing.

[0753] Lipids that can be used in nanoparticle formations (e.g., lipid nanoparticles) include, for example those described in Table 4 of WO2019217941, which is incorporated by reference e.g., a lipid-containing nanoparticle can comprise one or more of the lipids in table 4 of WO2019217941. Lipid nanoparticles can include additional elements, such as polymers, such as the polymers described in table 5 of WO2019217941, incorporated by reference.

[0754] In some embodiments, conjugated lipids, when present, can include one or more of PEG-diacylglycerol (DAG) (such as 1-(monomethoxy-polyethyleneglycol)-2,3-dimyristoylglycerol (PEG-DMG)), PEG-dialkyloxypropyl (DAA), PEG-phospholipid, PEG-ceramide (Cer), a pegylated phosphatidylethanoloamine (PEG-PE), PEG succinate diacylglycerol (PEGS-DAG) (such as 4-0-(2′,3′-di(tetradecanoyloxy)propyl-1-0-(w-methoxy(polyethoxy)ethyl) butanedioate (PEG-S-DMG)), PEG dialkoxypropylcarbam, N-(carbonyl-methoxypoly ethylene glycol 2000)-1,2-distearoyl-sn-glycero-3-phosphoethanolamine sodium salt, and those described in Table 2 of WO2019051289 (incorporated by reference), and combinations of the foregoing.

[0755] In some embodiments, sterols that can be incorporated into lipid nanoparticles include one or more of cholesterol or cholesterol derivatives, such as those in WO2009/127060 or US2010/0130588, which are incorporated by reference. Additional exemplary sterols include phytosterols, including those described in Eygeris et al (2020), dx.doi.org/10.1021/acs.nanolett.0c01386, incorporated herein by reference.

[0756] In some embodiments, the lipid particle comprises an ionizable lipid, a non-cationic lipid, a conjugated lipid that inhibits aggregation of particles, and a sterol. The amounts of these components can be varied independently and to achieve desired properties. For example, in some embodiments, the lipid nanoparticle comprises an ionizable lipid is in an amount from about 20 mol % to about 90 mol % of the total lipids (in other embodiments it may be 20-70% (mol), 30-60% (mol) or 40-50% (mol); about 50 mol % to about 90 mol % of the total lipid present in the lipid nanoparticle), a non-cationic lipid in an amount from about 5 mol % to about 30 mol % of the total lipids, a conjugated lipid in an amount from about 0.5 mol % to about 20 mol % of the total lipids, and a sterol in an amount from about 20 mol % to about 50 mol % of the total lipids. The ratio of total lipid to nucleic acid (e.g., encoding the Gene Writer or template nucleic acid) can be varied as desired. For example, the total lipid to nucleic acid (mass or weight) ratio can be from about 10:1 to about 30:1.

[0757] In some embodiments, an ionizable lipid may be a cationic lipid, an ionizable cationic lipid, e.g., a cationic lipid that can exist in a positively charged or neutral form depending on pH, or an amine-containing lipid that can be readily protonated. In some embodiments, the cationic lipid is a lipid capable of being positively charged, e.g., under physiological conditions. Exemplary cationic lipids include one or more amine group(s) which bear the positive charge. In some embodiments, the lipid particle comprises a cationic lipid in formulation with one or more of neutral lipids, ionizable amine-containing lipids, biodegradable alkyn lipids, steroids, phospholipids including polyunsaturated lipids, structural lipids (e.g., sterols), PEG, cholesterol and polymer conjugated lipids. In some embodiments, the cationic lipid may be an ionizable cationic lipid. An exemplary cationic lipid as disclosed herein may have an effective pKa over 6.0. In embodiments, a lipid nanoparticle may comprise a second cationic lipid having a different effective pKa (e.g., greater than the first effective pKa), than the first cationic lipid. A lipid nanoparticle may comprise between 40 and 60 mol percent of a cationic lipid, a neutral lipid, a steroid, a polymer conjugated lipid, and a therapeutic agent, e.g., a nucleic acid (e.g., RNA) described herein (e.g., a template nucleic acid or a nucleic acid encoding a GeneWriter), encapsulated within or associated with the lipid nanoparticle. In some embodiments, the nucleic acid is co-formulated with the cationic lipid. The nucleic acid may be adsorbed to the surface of an LNP, e.g., an LNP comprising a cationic lipid. In some embodiments, the nucleic acid may be encapsulated in an LNP, e.g., an LNP comprising a cationic lipid. In some embodiments, the lipid nanoparticle may comprise a targeting moiety, e.g., coated with a targeting agent. In embodiments, the LNP formulation is biodegradable. In some embodiments, a lipid nanoparticle comprising one or more lipid described herein, e.g., Formula (i), (ii), (ii), (vii) and/or (ix) encapsulates at least 1%, at least 5%, at least 10%, at least 20%, at least 30%, at least 40%, at least 50%, at least 60%, at least 70%, at least 80%, at least 90%, at least 92%, at least 95%, at least 97%, at least 98% or 100% of an RNA molecule, e.g., template RNA and/or a mRNA encoding the Gene Writer polypeptide.

[0758] In some embodiments, the lipid to nucleic acid ratio (mass/mass ratio; w/w ratio) can be in the range of from about 1:1 to about 25:1, from about 10:1 to about 14:1, from about 3:1 to about 15:1, from about 4:1 to about 10:1, from about 5:1 to about 9:1, or about 6:1 to about 9:1. The amounts of lipids and nucleic acid can be adjusted to provide a desired N/P ratio, for example, N/P ratio of 3, 4, 5, 6, 7, 8, 9, 10 or higher. Generally, the lipid nanoparticle formulation's overall lipid content can range from about 5 mg/ml to about 30 mg/mL.

[0759] Exemplary ionizable lipids that can be used in lipid nanoparticle formulations include, without limitation, those listed in Table 1 of WO2019051289, incorporated herein by reference. Additional exemplary lipids include, without limitation, one or more of the following formulae: X of US2016/0311759; I of US20150376115 or in US2016/0376224; I, II or III of US20160151284; I, IA, II, or IIA of US20170210967; I-c of US20150140070; A of US2013/0178541; I of US2013/0303587 or US2013/0123338; I of US2015/0141678; II, III, IV, or V of US2015/0239926; I of US2017/0119904; I or II of WO2017/117528; A of US2012/0149894; A of US2015/0057373; A of WO2013/116126; A of US2013/0090372; A of US2013/0274523; A of US2013/0274504; A of US2013/0053572; A of WO2013/016058; A of WO2012/162210; I of US2008/042973; I, II, III, or IV of US2012/01287670; I or II of US2014/0200257; I, II, or III of US2015/0203446; I or III of US2015/0005363; I, IA, IB, IC, ID, II, IIA, IIB, IIC, IID, or III-XXIV of US2014/0308304; of US2013/0338210; I, II, III, or IV of WO2009/132131; A of US2012/01011478; I or XXXV of US2012/0027796; XIV or XVII of US2012/0058144; of US2013/0323269; I of US2011/0117125; I, II, or III of US2011/0256175; I, II, III, IV, V, VI, VII, VIII, IX, X, XI, XII of US2012/0202871; I, II, III, IV, V, VI, VII, VIII, X, XII, XIII, XIV, XV, or XVI of US2011/0076335; I or II of US2006/008378; I of US2013/0123338; I or X-A-Y-Z of US2015/0064242; XVI, XVII, or XVIII of US2013/0022649; I, II, or III of US2013/0116307; I, II, or III of US2013/0116307; I or II of US2010/0062967; I-X of US2013/0189351; I of US2014/0039032; V of US2018/0028664; I of US2016/0317458; I of US2013/0195920; 5, 6, or 10 of U.S. Pat. No. 10,221,127; III-3 of WO2018/081480; I-5 or I-8 of WO2020/081938; 18 or 25 of U.S. Pat. No. 9,867,888; A of US2019/0136231; II of WO2020/219876; 1 of US2012/0027803; OF-02 of US2019/0240349; 23 of U.S. Pat. No. 10,086,013; cKK-E12/A6 of Miao et al (2020); C12-200 of WO2010/053572; 7C1 of Dahlman et al (2017); 304-013 or 503-013 of Whitehead et al; TS-P4C2 of U.S. Pat. No. 9,708,628; I of WO2020/106946; I of WO2020/106946.

[0760] In some embodiments, the ionizable lipid is MC3 (6Z,9Z,28Z,31Z)-heptatriaconta-6,9,28,31-tetraen-19-yl-4-(dimethylamino) butanoate (DLin-MC3-DMA or MC3), e.g., as described in Example 9 of WO2019051289A9 (incorporated by reference herein in its entirety). In some embodiments, the ionizable lipid is the lipid ATX-002, e.g., as described in Example 10 of WO2019051289A9 (incorporated by reference herein in its entirety). In some embodiments, the ionizable lipid is (13Z,16Z)-A,A-dimethyl-3-nonyldocosa-13, 16-dien-1-amine (Compound 32), e.g., as described in Example 11 of WO2019051289A9 (incorporated by reference herein in its entirety). In some embodiments, the ionizable lipid is Compound 6 or Compound 22, e.g., as described in Example 12 of WO2019051289A9 (incorporated by reference herein in its entirety). In some embodiments, the ionizable lipid is heptadecan-9-yl 8-((2-hydroxyethyl)(6-oxo-6-(undecyloxy)hexyl)amino)octanoate (SM-102); e.g., as described in Example 1 of U.S. Pat. No. 9,867,888 (incorporated by reference herein in its entirety). In some embodiments, the ionizable lipid is 9Z,12Z)-3-((4,4-bis(octyloxy)butanoyl)oxy)-2-((((3-(diethylamino)propoxy)carbonyl)oxy)methyl)propyl octadeca-9,12-dienoate (LP01) e.g., as synthesized in Example 13 of WO2015/095340 (incorporated by reference herein in its entirety). In some embodiments, the ionizable lipid is Di((Z)-non-2-en-1-yl) 9-((4-dimethylamino)butanoyl)oxy)heptadecanedioate (L319), e.g. as synthesized in Example 7, 8, or 9 of US2012/0027803 (incorporated by reference herein in its entirety). In some embodiments, the ionizable lipid is 1,1′-((2-(4-(2-((2-(Bis(2-hydroxydodecyl)amino)ethyl)(2-hydroxydodecyl) amino)ethyl)piperazin-1-yl)ethyl)azanediyl)bis(dodecan-2-ol) (C12-200), e.g., as synthesized in Examples 14 and 16 of WO2010/053572 (incorporated by reference herein in its entirety). In some embodiments, the ionizable lipid is; Imidazole cholesterol ester (ICE) lipid (3S,10R, 13R, 17R)-10, 13-dimethyl-17-((R)-6-methylheptan-2-yl)-2, 3, 4, 7, 8, 9, 10, 11, 12, 13, 14, 15, 16, 17-tetradecahydro-1H-cyclopenta[a]phenanthren-3-yl 3-(1H-imidazol-4-yl)propanoate, e.g., Structure (I) from WO2020/106946 (incorporated by reference herein in its entirety).

[0761] Some non-limiting example of lipid compounds that may be used (e.g., in combination with other lipid components) to form lipid nanoparticles for the delivery of compositions described herein, e.g., nucleic acid (e.g., RNA) described herein (e.g., a template nucleic acid or a nucleic acid encoding a GeneWriter) includes,

[chemical structure]

[0762] In some embodiments an LNP comprising Formula (i) is used to deliver a GeneWriter composition described herein to the liver and/or hepatocyte cells.

[chemical structure]

[0763] In some embodiments an LNP comprising Formula (ii) is used to deliver a GeneWriter composition described herein to the liver and/or hepatocyte cells.

[chemical structure]

[0764] In some embodiments an LNP comprising Formula (iii) is used to deliver a GeneWriter composition described herein to the liver and/or hepatocyte cells.

[chemical structure]

[0765] In some embodiments an LNP comprising Formula (v) is used to deliver a GeneWriter composition described herein to the liver and/or hepatocyte cells.

[chemical structure]

[0766] In some embodiments an LNP comprising Formula (vi) is used to deliver a GeneWriter composition described herein to the liver and/or hepatocyte cells.

[chemical structure]

[0767] In some embodiments an LNP comprising Formula (viii) is used to deliver a GeneWriter composition described herein to the liver and/or hepatocyte cells.

[chemical structure]

[0768] In some embodiments an LNP comprising Formula (ix) is used to deliver a GeneWriter composition described herein to the liver and/or hepatocyte cells.

[chemical structure]

[0769] wherein
[0770] X¹ is O, NR¹ or a direct bond, X² is C2-5 alkylene, X³ is C(═O) or a direct bond, R¹ is H or Me, R³ is Ci-3 alkyl, R² is Ci-3 alkyl, or R² taken together with the nitrogen atom to which it is attached and 1-3 carbon atoms of X² form a 4-, 5-, or 6-membered ring, or X¹ is NR¹, R¹ and R² taken together with the nitrogen atoms to which they are attached form a 5- or 6-membered ring, or R² taken together with R³ and the nitrogen atom to which they are attached form a 5-, 6-, or 7-membered ring, Y¹ is C2-12 alkylene, Y is selected from

[chemical structure]

[chemical structure]

[chemical structure]

[0771] (in either orientation), (in either orientation), (in either orientation),
[0772] n is 0 to 3, Z¹ is Ci-15 alkyl, Z is Ci-6 alkylene or a direct bond,
   [0773] Z² is

[chemical structure]

[0774] (in either orientation) or absent, provided that if Z¹ is a direct bond, Z² is absent;
[0775] R⁵ is C5-9 alkyl or C6-10 alkoxy, R⁶ is C5-9 alkyl or C6-10 alkoxy, W is methylene or a direct bond, and R⁷ is H or Me, or a salt thereof, provided that if R³ and R² are C2 alkyls, X¹ is O, X² is linear C3 alkylene, X³ is C(═O), Y¹ is linear Ce alkylene, (Y²)n-R⁴ is

[chemical structure]

[0776] R⁴ is linear C5 alkyl, Z¹ is C2 alkylene, Z is absent, W is methylene, and R⁷ is H, then R⁵ and R⁶ are not Cx alkoxy.

[0777] In some embodiments an LNP comprising Formula (xii) is used to deliver a GeneWriter composition described herein to the liver and/or hepatocyte cells.

[chemical structure]

[0778] In some embodiments an LNP comprising Formula (xi) is used to deliver a GeneWriter composition described herein to the liver and/or hepatocyte cells.

[chemical structure]

[0779] In some embodiments an LNP comprises a compound of Formula (xiii) and a compound of Formula (xiv).

[chemical structure]

[0780] In some embodiments an LNP comprising Formula (xv) is used to deliver a GeneWriter composition described herein to the liver and/or hepatocyte cells.

[chemical structure]

[0781] In some embodiments an LNP comprising a formulation of Formula (xvi) is used to deliver a GeneWriter composition described herein to the lung endothelial cells.

[chemical structure]

[0782] In some embodiments, a lipid compound used to form lipid nanoparticles for the delivery of compositions described herein, e.g., nucleic acid (e.g., RNA) described herein (e.g., a template nucleic acid or a nucleic acid encoding a GeneWriter) is made by one of the following reactions:

[chemical structure]

[0783] Exemplary non-cationic lipids include, but are not limited to, distearoyl-sn-glycero-phosphoethanolamine, distearoylphosphatidylcholine (DSPC), dioleoylphosphatidylcholine (DOPC), dipalmitoylphosphatidylcholine (DPPC), dioleoylphosphatidylglycerol (DOPG), 1,2-dioleoyl-sn-glycero-3-phosphoethanolamine (DOPE), dipalmitoylphosphatidylglycerol (DPPG), dioleoyl-phosphatidylethanolamine (DOPE), palmitoyloleoylphosphatidylcholine (POPC), palmitoyloleoylphosphatidylethanolamine (POPE), dioleoyl-phosphatidylethanolamine 4-(N-maleimidomethyl)-cyclohexane-1-carboxylate (DOPE-mal), dipalmitoyl phosphatidyl ethanolamine (DPPE), dimyristoylphosphoethanolamine (DMPE), distearoyl-phosphatidyl-ethanolamine (DSPE), monomethyl-phosphatidylethanolamine (such as 16-O-monomethyl PE), dimethyl-phosphatidylethanolamine (such as 16-O-dimethyl PE), 18-1-trans PE, 1-stearoyl-2-oleoyl-phosphatidyethanolamine (SOPE), hydrogenated soy phosphatidylcholine (HSPC), egg phosphatidylcholine (EPC), dioleoylphosphatidylserine (DOPS), sphingomyelin (SM), dimyristoyl phosphatidylcholine (DMPC), dimyristoyl phosphatidylglycerol (DMPG), distearoylphosphatidylglycerol (DSPG), dierucoylphosphatidylcholine (DEPC), palmitoyloleyolphosphatidylglycerol (POPG), dielaidoyl-phosphatidylethanolamine (DEPE), lecithin, phosphatidylethanolamine, lysolecithin, lysophosphatidylethanolamine, phosphatidylserine, phosphatidylinositol, sphingomyelin, egg sphingomyelin (ESM), cephalin, cardiolipin, phosphatidicacid,cerebrosides, dicetylphosphate, lysophosphatidylcholine, dilinoleoylphosphatidylcholine, or mixtures thereof. It is understood that other diacylphosphatidylcholine and diacylphosphatidylethanolamine phospholipids can also be used. The acyl groups in these lipids are preferably acyl groups derived from fatty acids having C10-C24 carbon chains, e.g., lauroyl, myristoyl, paimitoyl, stearoyl, or oleoyl. Additional exemplary lipids, in certain embodiments, include, without limitation, those described in Kim et al. (2020) dx.doi.org/10.1021/acs.nanolett.0c01386, incorporated herein by reference. Such lipids include, in some embodiments, plant lipids found to improve liver transfection with mRNA (e.g., DGTS In some embodiments, the non-cationic lipid may have the following structure,

[chemical structure]

[0784] Other examples of non-cationic lipids suitable for use in the lipid nanopartieles include, without limitation, nonphosphorous lipids such as, e.g., stearylamine, dodeeylamine, hexadecylamine, acetyl palmitate, glycerol ricinoleate, hexadecyl stereate, isopropyl myristate, amphoteric acrylic polymers, triethanolamine-lauryl sulfate, alkyl-aryl sulfate polyethyloxylated fatty acid amides, dioctadecyl dimethyl ammonium bromide, ceramide, sphingomyelin, and the like. Other non-cationic lipids are described in WO2017/099823 or US patent publication US2018/0028664, the contents of which is incorporated herein by reference in their entirety.

[0785] In some embodiments, the non-cationic lipid is oleic acid or a compound of Formula I, II, or IV of US2018/0028664, incorporated herein by reference in its entirety. The non-cationic lipid can comprise, for example, 0-30% (mol) of the total lipid present in the lipid nanoparticle. In some embodiments, the non-cationic lipid content is 5-20% (mol) or 10-15% (mol) of the total lipid present in the lipid nanoparticle. In embodiments, the molar ratio of ionizable lipid to the neutral lipid ranges from about 2:1 to about 8:1 (e.g., about 2:1, 3:1, 4:1, 5:1, 6:1, 7:1, or 8:1).

[0786] In some embodiments, the lipid nanoparticles do not comprise any phospholipids.

[0787] In some aspects, the lipid nanoparticle can further comprise a component, such as a sterol, to provide membrane integrity. One exemplary sterol that can be used in the lipid nanoparticle is cholesterol and derivatives thereof. Non-limiting examples of cholesterol derivatives include polar analogues such as 5a-choiestanol, 53-coprostanol, choiesteryl-(2′-hydroxy)-ethyl ether, choiesteryl-(4′-hydroxy)-butyl ether, and 6-ketocholestanol; non-polar analogues such as 5a-cholestane, cholestenone, 5a-cholestanone, 5p-cholestanone, and cholesteryl decanoate; and mixtures thereof. In some embodiments, the cholesterol derivative is a polar analogue, e.g., choiesteryl-(4′-hydroxy)-butyl ether. Exemplary cholesterol derivatives are described in PCT publication WO2009/127060 and US patent publication US2010/0130588, each of which is incorporated herein by reference in its entirety.

[0788] In some embodiments, the component providing membrane integrity, such as a sterol, can comprise 0-50% (mol) (e.g., 0-10%, 10-20%, 20-30%, 30-40%, or 40-50%) of the total lipid present in the lipid nanoparticle. In some embodiments, such a component is 20-50% (mol) 30-40% (mol) of the total lipid content of the lipid nanoparticle.

[0789] In some embodiments, the lipid nanoparticle can comprise a polyethylene glycol (PEG) or a conjugated lipid molecule. Generally, these are used to inhibit aggregation of lipid nanoparticles and/or provide steric stabilization. Exemplary conjugated lipids include, but are not limited to, PEG-lipid conjugates, polyoxazoline (POZ)-lipid conjugates, polyamide-lipid conjugates (such as ATTA-lipid conjugates), cationic-polymer lipid (CPL) conjugates, and mixtures thereof. In some embodiments, the conjugated lipid molecule is a PEG-lipid conjugate, for example, a (methoxy polyethylene glycol)-conjugated lipid.

[0790] Exemplary PEG-lipid conjugates include, but are not limited to, PEG-diacylglycerol (DAG) (such as 1-(monomethoxy-polyethyleneglycol)-2,3-dimyristoylglycerol (PEG-DMG)), PEG-dialkyloxypropyl (DAA), PEG-phospholipid, PEG-ceramide (Cer), a pegylated phosphatidylethanoloamine (PEG-PE), 1,2-dimyristoyl-sn-glycerol, methoxypoly ethylene glycol (DMG-PEG-2K), PEG succinate diacylglycerol (PEGS-DAG) (such as 4-0-(2′,3′-di(tetradecanoyloxy)propyl-1-0-(w-methoxy(polyethoxy)ethyl) butanedioate (PEG-S-DMG)), PEG dialkoxypropylcarbam, N-(carbonyl-methoxypolyethylene glycol 2000)-1,2-distearoyl-sn-glycero-3-phosphoethanolamine sodium salt, or a mixture thereof. Additional exemplary PEG-lipid conjugates are described, for example, in U.S. Pat. Nos. 5,885,613, 6,287,591, US2003/0077829, US2003/0077829, US2005/0175682, US2008/0020058, US2011/0117125, US2010/0130588, US2016/0376224, US2017/0119904, and US/099823, the contents of all of which are incorporated herein by reference in their entirety. In some embodiments, a PEG-lipid is a compound of Formula III, III-a-I, III-a-2, III-b-1, III-b-2, or V of US2018/0028664, the content of which is incorporated herein by reference in its entirety. In some embodiments, a PEG-lipid is of Formula II of US20150376115 or US2016/0376224, the content of both of which is incorporated herein by reference in its entirety. In some embodiments, the PEG-DAA conjugate can be, for example, PEG-dilauryloxypropyl, PEG-dimyristyloxypropyl, PEG-dipalmityloxypropyl, or PEG-distearyloxypropyl. The PEG-lipid can be one or more of PEG-DMG, PEG-dilaurylglycerol, PEG-dipalmitoylglycerol, PEG-disterylglycerol, PEG-dilaurylglycamide, PEG-dimyristylglycamide, PEG-dipalmitoylglycamide, PEG-disterylglycamide, PEG-cholesterol (1-[8′-(Cholest-5-en-3[beta]-oxy)carboxamido-3′,6′-dioxaoctanyl] carbamoyl-[omega]-methyl-poly(ethylene glycol), PEG-DMB (3,4-Ditetradecoxylbenzyl-[omega]-methyl-poly(ethylene glycol) ether), and 1,2-dimyristoyl-sn-glycero-3-phosphoethanolamine-N-[methoxy(polyethylene glycol)-2000]. In some embodiments, the PEG-lipid comprises PEG-DMG, 1,2-dimyristoyl-sn-glycero-3-phosphoethanolamine-N-[methoxy(polyethylene glycol)-2000]. In some embodiments, the PEG-lipid comprises a structure selected from:

[chemical structure]

[0791] In some embodiments, lipids conjugated with a molecule other than a PEG can also be used in place of PEG-lipid. For example, polyoxazoline (POZ)-lipid conjugates, polyamide-lipid conjugates (such as ATTA-lipid conjugates), and cationic-polymer lipid (GPL) conjugates can be used in place of or in addition to the PEG-lipid.

[0792] Exemplary conjugated lipids, i.e., PEG-lipids, (POZ)-lipid conjugates, ATTA-lipid conjugates and cationic polymer-lipids are described in the PCT and LIS patent applications listed in Table 2 of WO2019051289A9 and in WO2020106946A1, the contents of all of which are incorporated herein by reference in their entirety.

[0793] In some embodiments an LNP comprises a compound of Formula (xix), a compound of Formula (xxi) and a compound of Formula (xxv). In some embodiments a LNP comprising a formulation of Formula (xix), Formula (xxi) and Formula (xxv) is used to deliver a GeneWriter composition described herein to the lung or pulmonary cells.

[0794] In some embodiments, the PEG or the conjugated lipid can comprise 0-20% (mol) of the total lipid present in the lipid nanoparticle. In some embodiments, PEG or the conjugated lipid content is 0.5-10% or 2-5% (mol) of the total lipid present in the lipid nanoparticle. Molar ratios of the ionizable lipid, non-cationic-lipid, sterol, and PEG/conjugated lipid can be varied as needed. For example, the lipid particle can comprise 30-70% ionizable lipid by mole or by total weight of the composition, 0-60% cholesterol by mole or by total weight of the composition, 0-30% non-cationic-lipid by mole or by total weight of the composition and 1-10% conjugated lipid by mole or by total weight of the composition. Preferably, the composition comprises 30-40% ionizable lipid by mole or by total weight of the composition, 40-50% cholesterol by mole or by total weight of the composition, and 10-20% non-cationic-lipid by mole or by total weight of the composition. In some other embodiments, the composition is 50-75% ionizable lipid by mole or by total weight of the composition, 20-40% cholesterol by mole or by total weight of the composition, and 5 to 10% non-cationic-lipid, by mole or by total weight of the composition and 1-10% conjugated lipid by mole or by total weight of the composition. The composition may contain 60-70% ionizable lipid by mole or by total weight of the composition, 25-35% cholesterol by mole or by total weight of the composition, and 5-10% non-cationic-lipid by mole or by total weight of the composition. The composition may also contain up to 90% ionizable lipid by mole or by total weight of the composition and 2 to 15% non-cationic lipid by mole or by total weight of the composition. The formulation may also be a lipid nanoparticle formulation, for example comprising 8-30% ionizable lipid by mole or by total weight of the composition, 5-30% non-cationic lipid by mole or by total weight of the composition, and 0-20% cholesterol by mole or by total weight of the composition; 4-25% ionizable lipid by mole or by total weight of the composition, 4-25% non-cationic lipid by mole or by total weight of the composition, 2 to 25% cholesterol by mole or by total weight of the composition, 10 to 35% conjugate lipid by mole or by total weight of the composition, and 5% cholesterol by mole or by total weight of the composition; or 2-30% ionizable lipid by mole or by total weight of the composition, 2-30% non-cationic lipid by mole or by total weight of the composition, 1 to 15% cholesterol by mole or by total weight of the composition, 2 to 35% conjugate lipid by mole or by total weight of the composition, and 1-20% cholesterol by mole or by total weight of the composition; or even up to 90% ionizable lipid by mole or by total weight of the composition and 2-10% non-cationic lipids by mole or by total weight of the composition, or even 100% cationic lipid by mole or by total weight of the composition. In some embodiments, the lipid particle formulation comprises ionizable lipid, phospholipid, cholesterol and a PEG-ylated lipid in a molar ratio of 50:10:38.5:1.5. In some other embodiments, the lipid particle formulation comprises ionizable lipid, cholesterol and a PEG-ylated lipid in a molar ratio of 60:38.5:1.5.

[0795] In some embodiments, the lipid particle comprises ionizable lipid, non-cationic lipid (e.g. phospholipid), a sterol (e.g., cholesterol) and a PEG-ylated lipid, where the molar ratio of lipids ranges from 20 to 70 mole percent for the ionizable lipid, with a target of 40-60, the mole percent of non-cationic lipid ranges from 0 to 30, with a target of 0 to 15, the mole percent of sterol ranges from 20 to 70, with a target of 30 to 50, and the mole percent of PEG-ylated lipid ranges from 1 to 6, with a target of 2 to 5.

[0796] In some embodiments, the lipid particle comprises ionizable lipid/non-cationic-lipid/sterol/conjugated lipid at a molar ratio of 50:10:38.5:1.5.

[0797] In an aspect, the disclosure provides a lipid nanoparticle formulation comprising phospholipids, lecithin, phosphatidylcholine and phosphatidylethanolamine.

[0798] In some embodiments, one or more additional compounds can also be included. Those compounds can be administered separately or the additional compounds can be included in the lipid nanoparticles of the invention. In other words, the lipid nanoparticles can contain other compounds in addition to the nucleic acid or at least a second nucleic acid, different than the first. Without limitations, other additional compounds can be selected from the group consisting of small or large organic or inorganic molecules, monosaccharides, disaccharides, trisaccharides, oligosaccharides, polysaccharides, peptides, proteins, peptide analogs and derivatives thereof, peptidomimetics, nucleic acids, nucleic acid analogs and derivatives, an extract made from biological materials, or any combinations thereof.

[0799] In some embodiments, a lipid nanoparticle (or a formulation comprising lipid nanoparticles) lacks reactive impurities (e.g., aldehydes or ketones), or comprises less than a preselected level of reactive impurities (e.g., aldehydes or ketones). While not wishing to be bound by theory, in some embodiments, a lipid reagent is used to make a lipid nanoparticle formulation, and the lipid reagent may comprise a contaminating reactive impurity (e.g., an aldehyde or ketone). A lipid regent may be selected for manufacturing based on having less than a preselected level of reactive impurities (e.g., aldehydes or ketones). Without wishing to be bound by theory, in some embodiments, aldehydes can cause modification and damage of RNA, e.g., cross-linking between bases and/or covalently conjugating lipid to RNA (e.g., forming lipid-RNA adducts). This may, in some instances, lead to failure of a reverse transcriptase reaction and/or incorporation of inappropriate bases, e.g., at the site(s) of lesion(s), e.g., a mutation in a newly synthesized target DNA.

[0800] In some embodiments, a lipid nanoparticle formulation is produced using a lipid reagent comprising less than 5%, 4%, 3%, 2%, 1%, 0.9%, 0.8%, 0.7%, 0.6%, 0.5%, 0.4%, 0.3%, 0.2%, or 0.1% total reactive impurity (e.g., aldehyde) content. In some embodiments, a lipid nanoparticle formulation is produced using a lipid reagent comprising less than 5%, 4%, 3%, 2%, 1%, 0.9%, 0.8%, 0.7%, 0.6%, 0.5%, 0.4%, 0.3%, 0.2%, or 0.1% of any single reactive impurity (e.g., aldehyde) species. In some embodiments, a lipid nanoparticle formulation is produced using a lipid reagent comprising: (i) less than 5%, 4%, 3%, 2%, 1%, 0.9%, 0.8%, 0.7%, 0.6%, 0.5%, 0.4%, 0.3%, 0.2%, or 0.1% total reactive impurity (e.g., aldehyde) content; and (ii) less than 5%, 4%, 3%, 2%, 1%, 0.9%, 0.8%, 0.7%, 0.6%, 0.5%, 0.4%, 0.3%, 0.2%, or 0.1% of any single reactive impurity (e.g., aldehyde) species. In some embodiments, the lipid nanoparticle formulation is produced using a plurality of lipid reagents, and each lipid reagent of the plurality independently meets one or more criterion described in this paragraph. In some embodiments, each lipid reagent of the plurality meets the same criterion, e.g., a criterion of this paragraph.

[0801] In some embodiments, the lipid nanoparticle formulation comprises less than 5%, 4%, 3%, 2%, 1%, 0.9%, 0.8%, 0.7%, 0.6%, 0.5%, 0.4%, 0.3%, 0.2%, or 0.1% total reactive impurity (e.g., aldehyde) content. In some embodiments, the lipid nanoparticle formulation comprises less than 5%, 4%, 3%, 2%, 1%, 0.9%, 0.8%, 0.7%, 0.6%, 0.5%, 0.4%, 0.3%, 0.2%, or 0.1% of any single reactive impurity (e.g., aldehyde) species. In some embodiments, the lipid nanoparticle formulation comprises: (i) less than 5%, 4%, 3%, 2%, 1%, 0.9%, 0.8%, 0.7%, 0.6%, 0.5%, 0.4%, 0.3%, 0.2%, or 0.1% total reactive impurity (e.g., aldehyde) content; and (ii) less than 5%, 4%, 3%, 2%, 1%, 0.9%, 0.8%, 0.7%, 0.6%, 0.5%, 0.4%, 0.3%, 0.2%, or 0.1% of any single reactive impurity (e.g., aldehyde) species.

[0802] In some embodiments, one or more, or optionally all, of the lipid reagents used for a lipid nanoparticle as described herein or a formulation thereof comprise less than 5%, 4%, 3%, 2%, 1%, 0.9%, 0.8%, 0.7%, 0.6%, 0.5%, 0.4%, 0.3%, 0.2%, or 0.1% total reactive impurity (e.g., aldehyde) content. In some embodiments, one or more, or optionally all, of the lipid reagents used for a lipid nanoparticle as described herein or a formulation thereof comprise less than 5%, 4%, 3%, 2%, 1%, 0.9%, 0.8%, 0.7%, 0.6%, 0.5%, 0.4%, 0.3%, 0.2%, or 0.1% of any single reactive impurity (e.g., aldehyde) species. In some embodiments, one or more, or optionally all, of the lipid reagents used for a lipid nanoparticle as described herein or a formulation thereof comprise: (i) less than 5%, 4%, 3%, 2%, 1%, 0.9%, 0.8%, 0.7%, 0.6%, 0.5%, 0.4%, 0.3%, 0.2%, or 0.1% total reactive impurity (e.g., aldehyde) content; and (ii) less than 5%, 4%, 3%, 2%, 1%, 0.9%, 0.8%, 0.7%, 0.6%, 0.5%, 0.4%, 0.3%, 0.2%, or 0.1% of any single reactive impurity (e.g., aldehyde) species.

[0803] In some embodiments, total aldehyde content and/or quantity of any single reactive impurity (e.g., aldehyde) species is determined by liquid chromatography (LC), e.g., coupled with tandem mass spectrometry (MS/MS), e.g., as described herein. In some embodiments, reactive impurity (e.g., aldehyde) content and/or quantity of reactive impurity (e.g., aldehyde) species is determined by detecting one or more chemical modifications of a nucleic acid molecule (e.g., an RNA molecule, e.g., as described herein) associated with the presence of reactive impurities (e.g., aldehydes), e.g., in the lipid reagents. In some embodiments, reactive impurity (e.g., aldehyde) content and/or quantity of reactive impurity (e.g., aldehyde) species is determined by detecting one or more chemical modifications of a nucleotide or nucleoside (e.g., a ribonucleotide or ribonucleoside, e.g., comprised in or isolated from a template nucleic acid, e.g., as described herein) associated with the presence of reactive impurities (e.g., aldehydes), e.g., in the lipid reagents, e.g., as described. In embodiments, chemical modifications of a nucleic acid molecule, nucleotide, or nucleoside are detected by determining the presence of one or more modified nucleotides or nucleosides, e.g., using LC-MS/MS analysis, e.g., as described.

[0804] In some embodiments, a nucleic acid (e.g., RNA) described herein (e.g., a template nucleic acid or a nucleic acid encoding a GeneWriter) does not comprise an aldehyde modification, or comprises less than a preselected amount of aldehyde modifications. In some embodiments, on average, a nucleic acid has less than 50, 20, 10, 5, 2, or 1 aldehyde modifications per 1000 nucleotides, e.g., wherein a single cross-linking of two nucleotides is a single aldehyde modification. In some embodiments, the aldehyde modification is an RNA adduct (e.g., a lipid-RNA adduct). In some embodiments, the aldehyde-modified nucleotide is cross-linking between bases. In some embodiments, a nucleic acid (e.g., RNA) described herein comprises less than 50, 20, 10, 5, 2, or 1 cross-links between nucleotide.

[0805] In some embodiments, LNPs are directed to specific tissues by the addition of targeting domains. For example, biological ligands may be displayed on the surface of LNPs to enhance interaction with cells displaying cognate receptors, thus driving association with and cargo delivery to tissues wherein cells express the receptor. In some embodiments, the biological ligand may be a ligand that drives delivery to the liver, e.g., LNPs that display GalNAc result in delivery of nucleic acid cargo to hepatocytes that display asialoglycoprotein receptor (ASGPR). The work of Akinc et al. Mol Ther 18(7):1357-1364 (2010) teaches the conjugation of a trivalent GalNAc ligand to a PEG-lipid (GalNAc-PEG-DSG) to yield LNPs dependent on ASGPR for observable LNP cargo effect (see, e.g., FIG. 6). Other ligand-displaying LNP formulations, e.g., incorporating folate, transferrin, or antibodies, are discussed in WO2017223135, which is incorporated herein by reference in its entirety, in addition to the references used therein, namely Kolhatkar et al., Curr Drug Discov Technol. 2011 8:197-206; Musacchio and Torchilin, Front Biosci. 2011 16:1388-1412; Yu et al., Mol Membr Biol. 2010 27:286-298; Patil et al., Crit Rev Ther Drug Carrier Syst. 2008 25:1-61; Benoit et al., Biomacromolecules. 2011 12:2708-2714; Zhao et al., Expert Opin Drug Deliv. 2008 5:309-319; Akinc et al., Mol Ther. 2010 18:1357-1364; Srinivasan et al., Methods Mol Biol. 2012 820:105-116; Ben-Arie et al., Methods Mol Biol. 2012 757:497-507; Peer 2010 J Control Release. 20:63-68; Peer et al., Proc Natl Acad Sci USA. 2007 104:4095-4100; Kim et al., Methods Mol Biol. 2011 721:339-353; Subramanya et al., Mol Ther. 2010 18:2028-2037; Song et al., Nat Biotechnol. 2005 23:709-717; Peer et al., Science. 2008 319:627-630; and Peer and Lieberman, Gene Ther. 2011 18:1127-1133.

[0806] In some embodiments, LNPs are selected for tissue-specific activity by the addition of a Selective ORgan Targeting (SORT) molecule to a formulation comprising traditional components, such as ionizable cationic lipids, amphipathic phospholipids, cholesterol and poly(ethylene glycol) (PEG) lipids. The teachings of Cheng et al. Nat Nanotechnol 15(4):313-320 (2020) demonstrate that the addition of a supplemental “SORT” component precisely alters the in vivo RNA delivery profile and mediates tissue-specific (e.g., lungs, liver, spleen) gene delivery and editing as a function of the percentage and biophysical property of the SORT molecule.

[0807] In some embodiments, the LNPs comprise biodegradable, ionizable lipids. In some embodiments, the LNPs comprise (9Z,12Z)-3-((4,4-bis(octyloxy)butanoyl)oxy)-2-((((3-(diethylamino)propoxy)carbonyl)oxy)methyl)propyl octadeca-9,12-dienoate, also called 3-((4,4-bis(octyloxy)butanoyl)oxy)-2-((((3-(diethylamino)propoxy)carbonyl)oxy)methyl)propyl (9Z,12Z)-octadeca-9,12-dienoate) or another ionizable lipid. See, e.g., lipids of WO2019/067992, WO/2017/173054, WO2015/095340, and WO2014/136086, as well as references provided therein. In some embodiments, the term cationic and ionizable in the context of LNP lipids is interchangeable, e.g., wherein ionizable lipids are cationic depending on the pH.

[0808] In some embodiments, multiple components of a Gene Writer system may be prepared as a single LNP formulation, e.g., an LNP formulation comprises mRNA encoding for the Gene Writer polypeptide and an RNA template. Ratios of nucleic acid components may be varied in order to maximize the properties of a therapeutic. In some embodiments, the ratio of RNA template to mRNA encoding a Gene Writer polypeptide is about 1:1 to 100:1, e.g., about 1:1 to 20:1, about 20:1 to 40:1, about 40:1 to 60:1, about 60:1 to 80:1, or about 80:1 to 100:1, by molar ratio. In other embodiments, a system of multiple nucleic acids may be prepared by separate formulations, e.g., one LNP formulation comprising a template RNA and a second LNP formulation comprising an mRNA encoding a Gene Writer polypeptide. In some embodiments, the system may comprise more than two nucleic acid components formulated into LNPs. In some embodiments, the system may comprise a protein, e.g., a Gene Writer polypeptide, and a template RNA formulated into at least one LNP formulation.

[0809] In some embodiments, the average LNP diameter of the LNP formulation may be between 10s of nm and 100s of nm, e.g., measured by dynamic light scattering (DLS). In some embodiments, the average LNP diameter of the LNP formulation may be from about 40 nm to about 150 nm, such as about 40 nm, 45 nm, 50 nm, 55 nm, 60 nm, 65 nm, 70 nm, 75 nm, 80 nm, 85 nm, 90 nm, 95 nm, 100 nm, 105 nm, 110 nm, 115 nm, 120 nm, 125 nm, 130 nm, 135 nm, 140 nm, 145 nm, or 150 nm. In some embodiments, the average LNP diameter of the LNP formulation may be from about 50 nm to about 100 nm, from about 50 nm to about 90 nm, from about 50 nm to about 80 nm, from about 50 nm to about 70 nm, from about 50 nm to about 60 nm, from about 60 nm to about 100 nm, from about 60 nm to about 90 nm, from about 60 nm to about 80 nm, from about 60 nm to about 70 nm, from about 70 nm to about 100 nm, from about 70 nm to about 90 nm, from about 70 nm to about 80 nm, from about 80 nm to about 100 nm, from about 80 nm to about 90 nm, or from about 90 nm to about 100 nm. In some embodiments, the average LNP diameter of the LNP formulation may be from about 70 nm to about 100 nm. In a particular embodiment, the average LNP diameter of the LNP formulation may be about 80 nm. In some embodiments, the average LNP diameter of the LNP formulation may be about 100 nm. In some embodiments, the average LNP diameter of the LNP formulation ranges from about 1 mm to about 500 mm, from about 5 mm to about 200 mm, from about 10 mm to about 100 mm, from about 20 mm to about 80 mm, from about 25 mm to about 60 mm, from about 30 mm to about 55 mm, from about 35 mm to about 50 mm, or from about 38 mm to about 42 mm.

[0810] A LNP may, in some instances, be relatively homogenous. A polydispersity index may be used to indicate the homogeneity of a LNP, e.g., the particle size distribution of the lipid nanoparticles. A small (e.g., less than 0.3) polydispersity index generally indicates a narrow particle size distribution. A LNP may have a polydispersity index from about 0 to about 0.25, such as 0.01, 0.02, 0.03, 0.04, 0.05, 0.06, 0.07, 0.08, 0.09, 0.10, 0.11, 0.12, 0.13, 0.14, 0.15, 0.16, 0.17, 0.18, 0.19, 0.20, 0.21, 0.22, 0.23, 0.24, or 0.25. In some embodiments, the polydispersity index of a LNP may be from about 0.10 to about 0.20.

[0811] The zeta potential of a LNP may be used to indicate the electrokinetic potential of the composition. In some embodiments, the zeta potential may describe the surface charge of a LNP. Lipid nanoparticles with relatively low charges, positive or negative, are generally desirable, as more highly charged species may interact undesirably with cells, tissues, and other elements in the body. In some embodiments, the zeta potential of a LNP may be from about −10 mV to about +20 mV, from about −10 mV to about +15 mV, from about −10 mV to about +10 mV, from about −10 mV to about +5 mV, from about −10 mV to about 0 mV, from about −10 mV to about −5 mV, from about −5 mV to about +20 mV, from about −5 mV to about +15 mV, from about −5 mV to about +10 mV, from about −5 mV to about +5 mV, from about −5 mV to about 0 mV, from about 0 mV to about +20 mV, from about 0 mV to about +15 mV, from about 0 mV to about +10 mV, from about 0 mV to about +5 mV, from about +5 mV to about +20 mV, from about +5 mV to about +15 mV, or from about +5 mV to about +10 mV.

[0812] The efficiency of encapsulation of a protein and/or nucleic acid, e.g., Gene Writer polypeptide or mRNA encoding the polypeptide, describes the amount of protein and/or nucleic acid that is encapsulated or otherwise associated with a LNP after preparation, relative to the initial amount provided. The encapsulation efficiency is desirably high (e.g., close to 100%). The encapsulation efficiency may be measured, for example, by comparing the amount of protein or nucleic acid in a solution containing the lipid nanoparticle before and after breaking up the lipid nanoparticle with one or more organic solvents or detergents. An anion exchange resin may be used to measure the amount of free protein or nucleic acid (e.g., RNA) in a solution. Fluorescence may be used to measure the amount of free protein and/or nucleic acid (e.g., RNA) in a solution. For the lipid nanoparticles described herein, the encapsulation efficiency of a protein and/or nucleic acid may be at least 50%, for example 50%, 55%, 60%, 65%, 70%, 75%, 80%, 85%, 90%, 91%, 92%, 93%, 94%, 95%, 96%, 97%, 98%, 99%, or 100%. In some embodiments, the encapsulation efficiency may be at least 80%. In some embodiments, the encapsulation efficiency may be at least 90%. In some embodiments, the encapsulation efficiency may be at least 95%.

[0813] A LNP may optionally comprise one or more coatings. In some embodiments, a LNP may be formulated in a capsule, film, or table having a coating. A capsule, film, or tablet including a composition described herein may have any useful size, tensile strength, hardness or density.

[0814] Additional exemplary lipids, formulations, methods, and characterization of LNPs are taught by WO2020061457, which is incorporated herein by reference in its entirety.

[0815] In some embodiments, in vitro or ex vivo cell lipofections are performed using Lipofectamine MessengerMax (Thermo Fisher) or TransIT-mRNA Transfection Reagent (Mirus Bio). In certain embodiments, LNPs are formulated using the GenVoy_ILM ionizable lipid mix (Precision NanoSystems). In certain embodiments, LNPs are formulated using 2,2-dilinoleyl-4-dimethylaminoethyl-[1,3]-dioxolane (DLin-KC2-DMA) or dilinoleylmethyl-4-dimethylaminobutyrate (DLin-MC3-DMA or MC3), the formulation and in vivo use of which are taught in Jayaraman et al. Angew Chem Int Ed Engl 51(34):8529-8533 (2012), incorporated herein by reference in its entirety.

[0816] LNP formulations optimized for the delivery of CRISPR-Cas systems, e.g., Cas9-gRNA RNP, gRNA, Cas9 mRNA, are described in WO2019067992 and WO2019067910, both incorporated by reference.

[0817] Additional specific LNP formulations useful for delivery of nucleic acids are described in U.S. Pat. Nos. 8,158,601 and 8,168,775, both incorporated by reference, which include formulations used in patisiran, sold under the name ONPATTRO.

[0818] Exemplary dosing of Gene Writer LNP may include about 0.1, 0.25, 0.3, 0.5, 1, 2, 3, 4, 5, 6, 8, 10, or 100 mg/kg (RNA). Exemplary dosing of AAV comprising a nucleic acid encoding one or more components of the system may include an MOI of about 10¹¹, 10¹², 10¹³, and 1014 vg/kg.

### 1.1.3.1 Suitable Indications

[0819] Exemplary suitable diseases and disorders that can be treated by the systems or methods provided herein, for example, those comprising Gene Writers, include, without limitation: Baraitser-Winter syndromes 1 and 2; Diabetes mellitus and insipidus with optic atrophy and deafness; Alpha-1-antitrypsin deficiency; Heparin cofactor II deficiency; Adrenoleukodystrophy; Keppen-Lubinsky syndrome; Treacher collins syndrome 1; Mitochondrial complex I, 11, III, III (nuclear type 2, 4, or 8) deficiency; Hypermanganesemia with dystonia, polycythemia and cirrhosis; Carcinoid tumor of intestine; Rhabdoid tumor predisposition syndrome 2; Wilson disease: Hyperphenylalaninemia, bh4-deficient, a, due to partial pts deficiency, BH4-deficient, D, and non-pku; Hyperinsulinemic hypoglycemia familial 3, 4, and 5; Keratosis follicularis; Oral-facial-digital syndrome; SeSAME syndrome; Deafness, nonsyndromic sensorineural, mitochondrial; Proteinuria; Insulin-dependent diabetes mellitus secretory diarrhea syndrome; Moyamoya disease 5; Diamond-Blackfan anemia 1, 5, 8, and 10; Pseudoachondroplastic spondyloepiphyseal dysplasia syndrome; Brittle cornea syndrome 2; Methylmalonic acidemia with homocystinuria, Adams-Oliver syndrome 5 and 6; autosomal recessive Agammaglobulinemia 2, Cortical malformations, occipital, Febrile seizures, familial, 11; Mucopolysaccharidosis type VI, type VI (severe), and type VII; Marden Walker like syndrome, Pseudoneonatal adrenoleukodystrophy; Spheroid body myopathy; Cleidocranial dysostosis; Multiple Cutaneous and Mucosal Venous Malformations; Liver failure acute infantile; Neonatal intrahepatic cholestasis caused by citrin deficiency, Ventricular septal defect 1; Oculodentodigital dysplasia; Wilms tumor I; Weill-Marchesani-like syndrome; Renal adysplasia; Cataract 1, 4, autosomal dominant, autosomal dominant, multiple types, with microcornea, coppock-like, juvenile, with microcomea and glucosuria, and nuclear diffuse nonprogressive; Odontohypophosphatasia; Cerebro-oculo-facio-skeletal syndrome; Schizophrenia 15; Cerebral amyloid angiopathy, APP-related; Hemophagocytic lymphohistiocytosis, familial, 3; Porphobilinogen synthase deficiency; Episodic ataxia type 2; Trichorhinophalangeal syndrome type 3; Progressive familial heart block type IB; Glioma susceptibility I; Lichtenstein-Knorr Syndrome; Hypohidrotic X-linked ectodermal dysplasia; Bartter syndrome types 3, 3 with hypocalciuria, and 4; Carbonic anhydrase VA deficiency, hyperammonemia due to; Cardiomyopathy; Poikiloderma, hereditary fibrosing, with tendon contractures, myopathy, and pulmonary fibrosis; Combined d-2- and 1-2-hydroxyglutaric aciduria; Arginase deficiency, Cone-rod dystrophy 2 and 6; Smith-Lemli-Opitz syndrome, Mucolipidosis III Gamma; Blau syndrome; Weiner syndrome; Meningioma; Iodotyrosyl coupling defect; Dubin-Johnson syndrome; 3-Oxo-5 alpha-steroid delta 4-dehydrogenase deficiency; Boucher Neuhauser syndrome; Iron accumulation in brain; Mental Retardation, X-Linked 102 and syndromic 13; familial, Pituitary adenoma predisposition; Hypoplasia of the corpus callosum; Hyperalphalipoproteinemia 2; Deficiency of ferroxidase; Growth hormone insensitivity with immunodeficiency; Marinesco-Sj\xc3\xb6gren syndrome; Martsolf syndrome; Gaze palsy, familial horizontal, with progressive scoliosis; Mitchell-Riley syndrome; Hypocalciuric hypercalcemia, familial, types 1 and 3; Rubinstein-Taybi syndrome, Epstein syndrome; Juvenile retinoschisis; Becker muscular dystrophy; Loeys-Dietz syndrome 1, 2, 3; Congenital muscular hypertrophy-cerebral syndrome; Familial juvenile gout, Spermatogenic failure 11, 3, and 8; Orofacial cleft 11 and 7. Cleft lip/palate-ectodermal dysplasia syndrome; Mental retardation, X-linked, nonspecific, syndromic, Hedera type, and syndromic, wu type; Combined oxidative phosphorylation deficiencies 1, 3, 4, 12, 15, and 25; Frontotemporal dementia; Kniest dysplasia; Familial cardiomyopathy; Benign familial hematuria; Pheochromocytoma, Aminoglycoside-induced deafness; Gamma-aminobutyric acid transaminase deficiency; Oculocutaneous albinism type IB, type 3, and type 4; Renal coloboma syndrome, CNS hypomyelination; Hennekam lymphangiectasia-lymphedema syndrome 2; Migraine, familial basilar; Distal spinal muscular atrophy, X-linked 3; X-linked periventricular heterotopia, Microcephaly, Mucopolysaccharidosis, MPS-I-H/S, MPS-II, MPS-III-A, MPS-III-B, MPS-III-C, MPS-IV-A, MPS-IV-B; Infantile Parkinsonism-dystonia; Frontotemporal dementia with TDP43 inclusions, TARDBP-related; Hereditary diffuse gastric cancer; Sialidosis type I and II; Microcephaly-capillary malformation syndrome, Hereditary breast and ovarian cancer syndrome; Brain small vessel disease with hemorrhage; Non-ketotic hyperglycinemia; Navajo neurohepatopathy; Auriculocondylar syndrome 2; Spastic paraplegia 15, 2, 3, 35, 39, 4, autosomal dominant, 55, autosomal recessive, and 5A; Autosomal recessive cutis laxa type IA and IB; Hemolytic anemia, nonspherocytic, due to glucose phosphate isomerase deficiency; Hutchinson-Gilford syndrome; Familial amyloid nephropathy with urticaria and deafness: Supravalvar aortic stenosis; Diffuse palmoplantar keratoderma, Bothnian type, Holt-Oram syndrome; Coffin Siris/Intellectual Disability; Left-right axis malformations; Rapadilino syndrome; Nanophthalmos 2; Craniosynostosis and dental anomalies; Paragangliomas 1; Snyder Robinson syndrome; Ventricular fibrillation: Activated PI3K-delta syndrome; Howel-Evans syndrome; Larsen syndrome, dominant type; Van Maldergem syndrome 2; MYH-associated polyposis, 6-pymvoyl-tetrahydropterin synthase deficiency; Alagille syndromes 1 and 2; Lymphangiomyomatosis; Muscle eye brain disease; WFSI-Related Disorders; Primary hypertrophic osteoarthropathy, autosomal recessive 2; Infertility; Nestor-Guillermo progeria syndrome; Mitochondrial trifunctional protein deficiency; Hypoplastic left heart syndrome 2; Primary dilated cardiomyopathy; Retinitis pigmentosa; Hirschsprung disease 3, Upshaw-Schulman syndrome; Desbuquois dysplasia 2; Diarrhea 3 (secretory sodium, congenital, syndromic) and 5 (with tufting enteropathy, congenital); Pachyonychia congenita 4 and type 2, Cerebral autosomal dominant and recessive arteriopathy with subcortical infarcts and leukoencephalopathy, Vi tel Ii form dystrophy; type II, type IV, IV (combined hepatic and myopathic), type V, and type VI; Atypical Rett syndrome; Atrioventricular septal defect 4; Papillon-Lef\xc3\xa8vre syndrome; Leber amaurosis; X-linked hereditary motor and sensory neuropathy; Progressive sclerosing poliodystrophy; Goldmann-Favre syndrome; Renal-hepatic-pancreatic dysplasia; Pallister-Hall syndrome; Amyloidogenic transthyretin amyloidosis; Melnick-Needles syndrome; 1-yperimmunoglobulin E syndrome; Posterior column ataxia with retinitis pigmentosa; Chondrodysplasia punctata 1, X-linked recessive and 2 X-linked dominant; Ectopia lentis, isolated autosomal recessive and dominant; Familial cold urticarial; Familial adenomatous polyposis 1 and 3; Porokeratosis 8, disseminated superficial actinic type; PIK3CA Related Overgrowth Spectrum; Cerebral cavernous malformations 2; Exudative vitreoretinopathy 6; Megalencephaly cutis marmorata telangiectatica congenital; TARP syndrome; Diabetes mellitus, permanent neonatal, with neurologic features; Short-rib thoracic dysplasia 11 or 3 with or without polydactyly; Hypertrichotic osteochondrodysplasia; beta Thalassemia; Niemann-Pick disease type C1, C2, type A, and type C1, adult form; Charcot-Marie-Tooth disease types 1B, 2B2, 2C, 2F, 21, 2U (axonal), 1C (demyelinating), dominant intermediate C. recessive intermediate A, 2A2, 4C, 4D, 4H, IF, IVF, and X; Tyrosinemia type I; Paroxysmal atrial fibrillation; UV-sensitive syndrome; Tooth agenesis, selective, 3 and 4; Merosin deficient congenital muscular dystrophy; Long-chain 3-hydroxyacyl-CoA dehydrogenase deficiency, Congenital aniridia; Left ventricular noncompaction 5; Deficiency of aromatic-L-amino-acid decarboxylase; Coronary heart disease: Leukonychia totalis; Distal arthrogryposis type 2B; Retinitis pigmentosa 10, 11, 12, 14, 15, 17, and 19; Robinow Sorauf syndrome, Tenorio Syndrome; Prolactinoma, Neurofibromatosis, type land type 2; Congenital muscular dystrophy-dystroglycanopathy with brain and eye anomalies, types A2, A7, A8, A1 1, and A14; Heterotaxy, visceral, 2, 4, and 6, autosomal, Jankovic Rivera syndrome, Lipodystrophy, familial partial, type 2 and 3; Hemoglobin H disease, nondeletional; Multicentric osteolysis, nodulosis and arthropathy; Thyroid agenesis; deficiency of Acyl-CoA dehydrogenase family, member 9; Alexander disease; Phytanic acid storage disease; Breast-ovarian cancer, familial 1, 2, and 4; Proline dehydrogenase deficiency; Childhood hypophosphatasia; Pancreatic agenesis and congenital heart disease; Vitamin D-dependent rickets, types land 2; Iridogoniodysgenesis dominant type and type 1, Autosomal recessive hypohidrotic ectodermal dysplasia syndrome; Mental retardation, X-linked, 3, 21, 30, and 72; Hereditary hemorrhagic telangiectasia type 2, Blepharophimosis, ptosis, and epicanthus inversus; Adenine phosphoribosyltransferase deficiency; Seizures, benign familial infantile, 2; Acrodysostosis 2, with or without hormone resistance, Tetralogy of Fallot; Retinitis pigmentosa 2, 20, 25, 35, 36, 38, 39, 4, 40, 43, 45, 48, 66, 7, 70, 72; Lysosomal acid lipase deficiency; Eichsfeld type congenital muscular dystrophy; Walker-Warburg congenital muscular dystrophy; TNF receptor-associated periodic fever syndrome (TRAPS); Progressive myoclonus epilepsy with ataxia; Epilepsy, childhood absence 2, 12 (idiopathic generalized, susceptibility to) 5 (nocturnal frontal lobe), nocturnal frontal lobe type 1, partial, with variable foci, progressive myoclonic 3, and X-linked, with variable learning disabilities and behavior disorders; Long QT syndrome; Dicarboxylic aminoaciduria, Brachydactyly types A1 and A2; Pseudoxanthoma elasticum-like disorder with multiple coagulation factor deficiency; Multisystemic smooth muscle dysfunction syndrome; Syndactyly Cenani Lenz type; Joubert syndrome 1, 6, 7, 9/15 (digenic), 14, 16, and 17, and Orofaciodigital syndrome xiv; Digitorenocerebral syndrome, Retinoblastoma; Dyskinesia, familial, with facial myokymia; Hereditary sensory and autonomic neuropathy type IIB amd IIA; familial hyperinsulinism; Megalencephalic leukoencephalopathy with subcortical cysts land 2a; Aase syndrome; Wiedemann-Steiner syndrome; Ichthvosis exfoliativa; Myotonia congenital; Granulomatous disease, chronic, X-linked, variant; Deficiency of 2-methylbutyryl-CoA dehydrogenase; Sarcoidosis, early-onset; Glaucoma, congenital and Glaucoma, congenital, Coloboma, Breast cancer, susceptibility to, Ceroid lipofuscinosis neuronal 2, 6, 7, and 10; Congenital generalized lipodystrophy type 2; Fructose-biphosphatase deficiency; Congenital contractural arachnodactyly; Lynch syndrome I and II; Phosphoglycerate dehydrogenase deficiency; Burn-Mckeown syndrome, Myocardial infarction 1; Achromatopsia 2 and 7; Retinitis Pigmentosa 73; Protan defect; Polymicrogyria, asymmetric, bilateral frontoparietal; Spinal muscular atrophy, distal, autosomal recessive, 5; Methylmalonic aciduria due to methylmalonyl-CoA mutase deficiency; Familial porencephaly; Hurler syndrome; Oto-palato-digital syndrome, types I and II: Sotos syndrome I or 2; Cardioencephalomyopathy, fatal infantile, due to cytochrome c oxidase deficiency; Parastremmatic dwarfism: Thyrotropin releasing hormone resistance, generalized; Diabetes mellitus, type 2, and insulin-dependent, 20; Thoracic aortic aneurysms and aortic dissections; Estrogen resistance; Maple syrup urine disease type 1A and type 3, Hypospadias 1 and 2, X-linked, Metachromatic leukodystrophy juvenile, late infantile, and adult types: Early T cell progenitor acute lymphoblastic leukemia; Neuropathy, Hereditary Sensory, Type IC; Mental retardation, autosomal dominant 31; Retinitis pigmentosa 39; Breast cancer, early-onset; May-Hegglin anomaly; Gaucher disease type I and Subacute neuronopathic; Temtamy syndrome; Spinal muscular atrophy, lower extremity predominant 2, autosomal dominant; Fanconi anemia, complementation group E, I, N, and O; Alkaptonuria; Hirschsprung disease: Combined malonic and methylmalonic aciduria; Arrhythmogenic right ventricular cardiomyopathy types 5, 8, and 10; Congenital lipomatous overgrowth, vascular malformations, and epidermal nevi; Timothy syndrome; Deficiency of guanidinoacetate methyltransferase; Myoclonic dystonia, Kanzaki disease; Neutral 1 amino acid transport defect; Neurohypophyseal diabetes insipidus: Thyroid hormone metabolism, abnormal; Benign scapuloperoneal muscular dystrophy with cardiomyopathy; Hypoglycemia with deficiency of glycogen synthetase in the liver; Hypertrophic cardiomyopathy: Myasthenic Syndrome, Congenital, 11, associated with acetylcholine receptor deficiency; Mental retardation X-linked syndromic 5; Stormorken syndrome; Aplastic anemia; Intellectual disability; Normokalemic periodic paralysis, potassium-sensitive; Danon disease; Nephronophthisis 13, 15 and 4; Thyrotoxic periodic paralysis and Thyrotoxic periodic paralysis 2, Infertility associated with multi-tailed spermatozoa and excessive DNA; Glaucoma, primary open angle, juvenile-onset; Afibrinogenemia and congenital Afibrinogenemia; Polycystic kidney disease 2, adult type, and infantile type; Familial porphyria cutanea tarda; Cerebello-oculo-renal syndrome (nephronophthisis, oculomotor apraxia and cerebellar abnormalities); Frontotemporal Dementia Chromosome 3-Linked and Frontotemporal dementia ubiquitin-positive; Metatrophic dysplasia: Immunodeficiency-centromeric instability-facial anomalies syndrome 2; Anemia, nonspherocytic hemolytic, due to G6PD deficiency; Bronchiectasis with or without elevated sweat chloride 3; Congenital myopathy with fiber type disproportion; Carney complex, type 1; Cryptorchidism, unilateral or bilateral: Ichthyosis bullosa of Siemens; Isolated lutropin deficiency; DFNA 2 Nonsyndromic Hearing Loss: Klein-Waardenberg syndrome: Gray platelet syndrome; Bile acid synthesis defect, congenital, 2; 46, XY sex reversal, type 1, 3, and 5; Acute intermittent porphyria; Cornelia de Fange syndromes 1 and 5; Hyperglycinuria; Cone-rod dystrophy 3; Dysfibrinogenemia; Karak syndrome, Congenital muscular dystrophy-dystroglycanopathy without mental retardation, type B5; Infantile nystagmus, X-linked; Dyskeratosis congenita, autosomal recessive, 1, 3, 4, and 5; Microcephaly with or without chorioretinopathy, lymphedema, or mental retardation; Hyperlysinemia; Bardet-Biedi syndromes 1, 11, 16, and 19; Autosomal recessive centronuclear myopathy, Frasier syndrome, Caudal regression syndrome; Fibrosis of extraocular muscles, congenital, 1, 2, 3a (with or without extraocular involvement), 3b; Prader-Willi-like syndrome, Malignant melanoma; Bloom syndrome, Darier disease, segmental; Multicentric osteolysis nephropathy; Hemochromatosis type 1, 2B, and 3; Cerebellar ataxia infantile with progressive external ophthalmoplegi and Cerebellar ataxia, mental retardation, and dysequilibrium syndrome 2; Hypoplastic left heart syndrome; Epilepsy, Hearing Loss, And Mental Retardation Syndrome; Transferrin serum level quantitative trait locus 2, Ocular albinism, type 1, Marfan syndrome; Congenital muscular dystrophy-dystroglycanopathy with brain and eye anomalies, type A14 and B14; Hyperammonemia, type III; Cryptophthalmos syndrome, Alopecia universalis congenital; Adult hypophosphatasia; Mannose-binding protein deficiency; Bull eye macular dystrophy; Autosomal dominant torsion dystonia 4; Nephrotic syndrome, type 3, type 5, with or without ocular abnormalities, type 7, and type 9; Seizures, Early infantile epileptic encephalopathy 7; Persistent hyperinsulinemic hypoglycemia of infancy; Thrombocytopenia, X-linked; Neonatal hypotonia; Orstavik Lindemann Solberg syndrome; Pulmonary hypertension, primary, 1, with hereditary hemorrhagic telangiectasia; Pituitary dependent hypercortisolism; Epidermodysplasia vemiciformis; Epidermolysis bullosa, junctional, localisata variant; Cytochrome c oxidase i deficiency; Kindler syndrome; Myosclerosis, autosomal recessive; Truncus arteriosus: Duane syndrome type 2; ADULT syndrome; Zellweger syndrome spectrum; Leukoencephalopathy with ataxia, with Brainstem and Spinal Cord Involvement and Lactate Elevation, with vanishing white matter, and progressive, with ovarian failure: Antithrombin III deficiency; Holoprosencephaly 7; Roberts-SC phocomelia syndrome; Mitochondrial DNA-depletion syndrome 3 and 7, hepatocerebral types, and 13 (encephalomyopathic type); Porencephaly 2; Microcephaly, normal intelligence and immunodeficiency, Giant axonal neuropathy; Sturge-Weber syndrome, Capillary malformations, congenital, 1; Fabry disease and Fabry disease, cardiac variant; Glutamate formiminotransferase deficiency; Fanconi-Bickel syndrome; Acromicric dysplasia; Epilepsy, idiopathic generalized, susceptibility to, 12; Basal ganglia calcification, idiopathic, 4; Polyglucosan body myopathy 1 with or without immunodeficiency; Malignant tumor of prostate, Congenital ectodermal dysplasia of face; Congenital heart disease; Age-related macular degeneration 3, 6, 11, and 12, Congenital myotonia, autosomal dominant and recessive forms, Hypomagnesemia 1, intestinal; Sulfite oxidase deficiency, isolated; Pick disease; Plasminogen deficiency, type 1; Syndactyly type 3, Cone-rod dystrophy amelogenesis imperfecta, Pseudoprimary hyperaldosteronism; Terminal osseous dysplasia; Batter syndrome antenatal type 2, Congenital muscular dystrophy-dystroglycanopathy with mental retardation, types B2, B3, B5, and B15; Familial infantile myasthenia; Lymphoproliferative syndrome 1, 1 (X-linked), and 2; Hypercholesterolaemia and Hypercholesterolemia, autosomal recessive; Neoplasm of ovary; Infantile GM1 gangliosidosis; Syndromic X-linked mental retardation 16; Deficiency of ribose-5-phosphate isomerase; Alzheimer disease, types, 1, 3, and 4; Andersen Tawil syndrome; Multiple synostoses syndrome 3; Chilbain lupus L; Hemophagocytic lymphohistiocytosis, familial, 2; Axenfeld-Rieger syndrome type 3; Myopathy, congenital with cores; Osteoarthritis with mild chondrodysplasia; Peroxisome biogenesis disorders; Severe congenital neutropenia; Hereditary neuralgic amyotrophy; Palmoplantar keratoderma, nonepidermolytic, focal or diffuse; Dysplasminogenemia; Familial colorectal cancer; Spastic ataxia 5, autosomal recessive, Charlevoix-Saguenay type, 1,10, or 11, autosomal recessive; Frontometaphyseal dysplasia land 3; Hereditary factors II, IX, VIII deficiency disease; Spondylocheirodysplasia, Ehlers-Danlos syndrome-like, with immune dysregulation, Aggrecan type, with congenital joint dislocations, short limb-hand type, Sedaghatian type, with cone-rod dystrophy, and Kozlowski type; Ichlhyosis prematurity syndrome, Stickler syndrome type 1, Focal segmental glomerulosclerosis 5; 5-Oxoprolinase deficiency; Microphthalmia syndromic 5, 7, and 9; Juvenile polyposis/hereditary hemorrhagic telangiectasia syndrome; Deficiency of butyryl-CoA dehydrogenase; Maturity-onset diabetes of the young, type 2; Mental retardation, syndromic. Claes-Jensen type, X-linked; Deafness, cochlear, with myopia and intellectual impairment, without vestibular involvement, autosomal dominant, X-linked 2; Spondylocarpotarsal synostosis syndrome; Sting-associated vasculopathy, infantile-onset; Neutral lipid storage disease with myopathy; Immune dysfunction with T-cell inactivation due to calcium entry defect 2; Cardiofaciocutaneous syndrome; Corticosterone methyloxidase type 2 deficiency; Hereditary myopathy with early respiratory failure; Interstitial nephritis, karyomegalic; Trimethylaminuria; Hyperimmunoglobulin D with periodic fever; Malignant hyperthermia susceptibility type 1; Trichomegaly with mental retardation, dwarfism and pigmentary degeneration of retina: Breast adenocarcinoma; Complement factor B deficiency; Ullrich congenital muscular dystrophy; Left ventricular noncompaction cardiomyopathy; Fish-eye disease; Finnish congenital nephrotic syndrome; Limb-girdle muscular dystrophy, type IB, 2A, 2B, 2D, C1, C5, C9, C14; Idiopathic fibrosing alveolitis, chronic form; Primary familial hypertrophic cardiomyopathy; Angiotensin i-converting enzyme, benign serum increase; Cd8 deficiency, familial; Proteus syndrome; Glucose-6-phosphate transport defect; Borjeson-Forssman-Lehmann syndrome; Zellweger syndrome, Spinal muscular atrophy, type II, Prostate cancer, hereditary, 2, Thrombocytopenia, platelet dysfunction. hemolysis, and imbalanced globin synthesis: Congenital disorder of glycosylation types IB, ID, 1G, 1H, 1J, 1K, IN, IP, 2C, 2J, 2K, llm; Junctional epidermolysis bullosa gravis of Herlitz; Generalized epilepsy with febrile seizures plus 3, type 1, type 2; Schizophrenia 4, Coronary artery disease, autosomal dominant 2; Dyskeratosis congenita, autosomal dominant, 2 and 5; Subcortical laminar heterotopia, X-linked; Adenylate kinase deficiency, X-linked severe combined immunodeficiency; Coproporphyria; Amyloid Cardiomyopathy, Transthyretin-related; Hypocalcemia, autosomal dominant 1; Brugada syndrome; Congenital myasthenic syndrome, acetazolamide-responsive; Primary hypomagnesemia; Sclerosteosis, Frontotemporal dementia and/or amyotrophic lateral sclerosis 3 and 4; Mevalonic aciduria; Schwannomatosis 2; Hereditary motor and sensory neuropathy with optic atrophy, Porphyria cutanea tarda; Osteochondritis dissecans; Seizures, benign familial neonatal, 1, and/or myokymia; Long QT syndrome, LQT1 subtype; Mental retardation, anterior maxillary protrusion, and strabismus, Idiopathic hypercalcemia of infancy; Hypogonadotropic hypogonadism 11 with or without anosmia; Polycystic lipomembranous osteodysplasia with sclerosing leukoencephalopathy, Primary autosomal recessive microcephaly 10, 2, 3, and 5; Interrupted aortic arch; Congenital amegakarvocytic thrombocytopenia; Hermansky-Pudlak syndrome 1, 3, 4, and 6; Long QT syndrome 1, 2, 2/9, 2/5, (digenic), 3, 5 and 5, acquired, susceptibility to; Andermann syndrome; Retinal cone dystrophy 3B; Erythropoietic protoporphyria; Sepiapterin reductase deficiency; Very long chain acyl-CoA dehydrogenase deficiency, Hyperferritinemia cataract syndrome; Silver spastic paraplegia syndrome; Charcot-Marie-Tooth disease; Atrial septal defect 2; Carnevale syndrome; Hereditary insensitivity to pain with anhidrosis; Catecholaminergic polymorphic ventricular tachycardia; Hypokalemic periodic paralysis 1 and 2; Sudden infant death syndrome; Hypochromic microcytic anemia with iron overload; GLUT deficiency syndrome 2; Leukodystrophy, Hypomyelinating, II and 6; Cone monochromatism; Osteopetrosis autosomal dominant type I and 2, recessive 4, recessive 1, recessive 6, Severe congenital neutropenia 3, autosomal recessive or dominant, Methionine adenosyltransferase deficiency, autosomal dominant; Paroxysmal familial ventricular fibrillation; Pyruvate kinase deficiency of red cells; Schneckenbecken dysplasia; Torsades de pointes; Distal myopathy Markesbery-Griggs type; Deficiency of UDPglucose-hexose-1-phosphate uridylyltransferase; Sudden cardiac death, Neu-Laxova syndrome 1; Atransferrinemia; Hyperparathyroidism 1 and 2; Cutaneous malignant melanoma 1; Symphalangism, proximal, lb; Progressive pseudorheumatoid dysplasia; Werdnig-Hoffmann disease; Achondrogenesis type 2; Holoprosencephaly 2, 3,7, and 9, Schindler disease, type 1; Cerebroretinal microangiopathy with calcifications and cysts; Heterotaxy, visceral, X-linked; Tuberous sclerosis syndrome; Kartagener syndrome; Thyroid hormone resistance, generalized, autosomal dominant; Bestrophinopathy, autosomal recessive; Nail disorder, nonsyndromic congenital, 8; Mohr-Tranebjaerg syndrome; Cone-rod dystrophy 12; Hearing impairment; Ovarioleukodystrophy, Renal tubular acidosis, proximal, with ocular abnormalities and mental retardation; Dihydropteridine reductase deficiency; Focal epilepsy with speech disorder with or without mental retardation, Ataxia-telangiectasia syndrome, Brown-Vialetto-Van laere syndrome and Brown-Vialetto-Van Laere syndrome 2; Cardiomyopathy; Peripheral demyelinating neuropathy, central dysmyelination, Comeal dystrophy, Fuchs endothelial, 4, Cowden syndrome 3, Dystonia 2 (torsion, autosomal recessive), 3 (torsion, X-linked), 5 (Dopa-responsive type), 10, 12, 16, 25, 26 (Myoclonic); Epiphyseal dysplasia, multiple, with myopia and conductive deafness; Cardiac conduction defect, nonspecific; Branchiootic syndromes 2 and 3; Peroxisome biogenesis disorder 14B, 2A, 4A, 5B, 6A, 7A, and 7B; Familial renal glucosuria; Candidiasis, familial, 2, 5, 6, and 8; Autoimmune disease, multisystem, infantile-onset; Early infantile epileptic encephalopathy 2, 4, 7, 9, 10, 11, 13, and 14; Segawa syndrome, autosomal recessive; Deafness, autosomal dominant 3a, 4, 12, 13, 15, autosomal dominant nonsyndromic sensorineural 17, 20, and 65, Congenital dyserythropoietic anemia, type I and II; Enhanced s-cone syndrome; Adult neuronal ceroid lipofuscinosis; Atrial fibrillation, familial, 11, 12, 13, and 16; Norum disease; Osteosarcoma; Partial albinism; Biotinidase deficiency; Combined cellular and humoral immune defects with granulomas; Alpers encephalopathy; Holocarboxylase synthetase deficiency; Maturity-onset diabetes of the young, type 1, type 2, type 11, type 3, and type 9; Variegate porphyria; Infantile cortical hyperostosis; Testosterone 17-beta-dehydrogenase deficiency; L-2-hydroxyglutaric aciduria; Tyrosinase-negative oculocutaneous albinism; Primary ciliary dyskinesia 24; Pontocerebellar hypoplasia type 4; Ciliary dyskinesia, primary, 7, 11, 15, 20 and 22; Idiopathic basal ganglia calcification 5; Brain atrophy; Craniosynostosis 1 and 4; Keratoconus 1: Rasopathy; Congenital adrenal hyperplasia and Congenital adrenal hypoplasia, X-linked, Mitochondrial DNA depletion syndrome 11, 12 (cardiomyopathic type), 2, 4B (MNGIE type), 8B (MNGIE type); Brachydactyly with hypertension; Cornea plana 2; Aarskog syndrome; Multiple epiphyseal dysplasia 5 or Dominant, Comeal endothelial dystrophy type 2; Aminoacylase 1 deficiency; Delayed speech and language development; Nicolaides-Baraitser syndrome; Enterokinase deficiency, Ectrodactyly, ectodermal dysplasia, and cleft lip/palate syndrome 3; Arthrogryposis multiplex congenita, distal, X-linked; Perrault syndrome 4; Jervell and Lange-Nielsen syndrome 2; Hereditary Nonpolyposis Colorectal Neoplasms, Robinow syndrome, autosomal recessive, autosomal recessive, with brachy-syn-polydactyly: Neurofibrosarcoma; Cytochrome-c oxidase deficiency; Vesicoureteral reflux 8; Dopamine beta hydroxylase deficiency; Carbohydrate-deficient glycoprotein syndrome type I and II; Progressive familial intrahepatic cholestasis 3; Benign familial neonatal-infantile seizures; Pancreatitis, chronic, susceptibility to, Rhizomelic chondrodysplasia punctata type 2 and type 3; Disordered steroidogenesis due to cytochrome p450 oxidoreductase deficiency; Deafness with labyrinthine aplasia microtia and microdontia (FAMM); Rothmund-Thomson syndrome; Cortical dysplasia, complex, with other brain malformations 5 and 6; Myasthenia, familial infantile. 1; Trichorhinophalangeal dysplasia type I; Worth disease, Splenic hypoplasia; Molybdenum cofactor deficiency, complementation group A; Sebastian syndrome: Progressive familial intrahepatic cholestasis 2 and 3, Weill-Marchesani syndrome 1 and 3; Microcephalic osteodysplastic primordial dwarfism type 2; Surfactant metabolism dysfunction, pulmonary, 2 and 3; Severe X-linked myotubular myopathy; Pancreatic cancer 3; Platelet-type bleeding disorder 15 and 8, Tyrosinase-positive oculocutaneous albinism, Borrone Di Rocco Crovato syndrome; ATR-X syndrome; Sucrase-isomaltase deficiency; Complement component 4, partial deficiency of, due to dysfunctional cl inhibitor, Congenital central hypoventilation; Infantile hypophosphatasia; Plasminogen activator inhibitor type 1 deficiency; Malignant lymphoma, non-Hodgkin; Hyperornithinemia-hyperammonemia-homocitrullinuria syndrome; Schwartz Jampel syndrome type 1; Fetal hemoglobin quantitative trait locus 1; Myopathy, distal, with anterior tibial onset; Noonan syndrome 1 and 4, LEOPARD syndrome 1; Glaucoma 1, open angle, e, F, and G; Kenny-Caffey syndrome type 2; PTEN hamartoma tumor syndrome; Duchenne muscular dystrophy; Insulin-resistant diabetes mellitus and acanthosis nigricans; Microphthalmia, isolated 3, 5, 6, 8, and with coloboma 6; Raine syndrome; Premature ovarian failure 4, 5, 7, and 9; Allan-Hemdon-Dudley syndrome; Citrullinemia type I; Alzheimer disease, familial, 3, with spastic paraparesis and apraxia; Familial hemiplegic migraine types I and 2; Ventriculomegaly with cystic kidney disease; Pseudoxanthoma elasticum; Homocysteinemia due to MTHFR deficiency, CBS deficiency, and Homocystinuria, pyridoxine-responsive; Dilated cardiomyopathy 1A, 1AA, 1C, 1G, IBB, 1DD, IFF, 1HH, II, IKK, IN, IS, 1Y, and 3B; Muscle AMP guanine oxidase deficiency, Familial cancer of breast; Hereditary sideroblastic anemia, Myoglobinuria, acute recurrent, autosomal recessive; Neuroferritinopathy; Cardiac arrhythmia; Glucose transporter type 1 deficiency syndrome; Holoprosencephaly sequence, Angiopathy, hereditary, with nephropathy, aneurysms, and muscle cramps; Isovaleryl-CoA dehydrogenase deficiency; Kallmann syndrome 1, 2, and 6; Permanent neonatal diabetes mellitus, Acrocallosal syndrome, Schinzel type; Gordon syndrome; MYH9 related disorders; Donnai Barrow syndrome; Severe congenital neutropenia and 6, autosomal recessive; Charcot-Marie-Tooth disease, types ID and IVF; Coffin-Lowry syndrome; mitochondrial 3-hydroxy-3-methylglutaryl-CoA synthase deficiency; Hypomagnesemia, seizures, and mental retardation; Ischiopatellar dysplasia; Multiple congenital anomalies-hypotonia-seizures syndrome 3; Spastic paraplegia 50, autosomal recessive; Short stature with nonspecific skeletal abnormalities; Severe myoclonic epilepsy in infancy, Propionic academia; Adolescent nephronophthisis; Macrocephaly, macrosomia, facial dysmorphism syndrome; Stargardt disease 4; Ehlers-Danlos syndrome type 7 (autosomal recessive), classic type, type 2 (progeroid), hydroxylysine-deficient, type 4, type 4 variant, and due to tenascin-X deficiency; Myopia 6; Coxa plana; Familial cold autoinflammatory syndrome 2; Malformation of the heart and great vessels; von Willebrand disease type 2M and type 3; Deficiency of galactokinase; Brugada syndrome 1, X-linked ichthyosis with steryl-sulfatase deficiency; Congenital ocular coloboma; Histiocytosis-lymphadenopathy plus syndrome, Aniridia, cerebellar ataxia, and mental retardation: Left ventricular noncompaction 3; Amyotrophic lateral sclerosis types 1, 6, 15 (with or without frontotemporal dementia), 22 (with or without frontotemporal dementia), and 10; Osteogenesis imperfecta type 12, type 5, type 7, type 8, type I, type III, with normal sclerae, dominant form, recessive perinatal lethal; Hematologic neoplasm; Favism, susceptibility to; Pulmonary Fibrosis And/Or Bone Marrow Failure, Telomere-Related. 1 and 3; Dominant hereditary optic atrophy; Dominant dystrophic epidermolysis bullosa with absence of skin; Muscular dystrophy, congenital, megaconial type; Multiple gastrointestinal atresias; McCune-Albright syndrome; Nail-patella syndrome; McLeod neuroacanthocytosis syndrome; Common variable immunodeficiency 9; Partial hypoxanthine-guanine phosphoribosyltransferase deficiency; Pseudohypoaldosteronism type I autosomal dominant and recessive and type 2; Urocanate hydratase deficiency, Heterotopia; Meckel syndrome type 7, Ch\xc3\xa9diak-Higashi syndrome, Chediak-Higashi syndrome, adult type: Severe combined immunodeficiency due to ADA deficiency, with microcephaly, growth retardation, and sensitivity to ionizing radiation, atypical, autosomal recessive, T cell-negative, B cell-positive, NK cell-negative of NK-positive; Insulin resistance, Deficiency of steroid 11-beta-monooxygenase; Popliteal pterygium syndrome; Pulmonary arterial hypertension related to hereditary hemorrhagic telangiectasia; Deafness, autosomal recessive IA, 2, 3, 6, 8, 9, 12, 15, 16, 18b, 22, 28, 31, 44, 49, 63, 77, 86, and 89; Primary hyperoxaluria, type 1, type, and type 11I; Paramyotonia congenita of von Eulenburg; Desbuquois syndrome; Camitine palmitoyltransferase I, II, II (late onset), and II (infantile) deficiency; Secondary hypothyroidism; Mandibulofacial dysostosis, Treacher Collins type, autosomal recessive; Cowden syndrome 1; Li-Fraumeni syndrome 1; Asparagine synthetase deficiency, Malattia leventinese; Optic atrophy 9; Infantile convulsions and paroxysmal choreoathetosis, familial; Ataxia with vitamin E deficiency; Islet cell hyperplasia; Miyoshi muscular dystrophy 1; Thrombophilia, hereditary, due to protein C deficiency, autosomal dominant and recessive; Fechtner syndrome; Properdin deficiency, X-linked; Mental retardation, stereotypic movements, epilepsy, and/or cerebral malformations; Creatine deficiency, X-linked, Pilomatrixoma; Cyanosis, transient neonatal and atypical nephropathic; Adult onset ataxia with oculomotor apraxia; Hemangioma, capillary infantile; PC-K6a; Generalized dominant dystrophic epidermolysis bullosa; Pelizaeus-Merzbacher disease; Myopathy, centronuclear, 1, congenital, with excess of muscle spindles, distal, 1, lactic acidosis, and sideroblastic anemia 1, mitochondrial progressive with congenital cataract, hearing loss, and developmental delay, and tubular aggregate, 2; Benign familial neonatal seizures I and 2; Primary pulmonary hypertension: Lymphedema, primary, with myelodysplasia; Congenital long QT syndrome; Familial exudative vitreoretinopathy, X-linked; Autosomal dominant hypohidrotic ectodermal dysplasia; Primordial dwarfism; Familial pulmonary capillary hemangiomatosis, Carnitine acylcamitine translocase deficiency: Visceral myopathy; Familial Mediterranean fever and Familial mediterranean fever, autosomal dominant, Combined partial and complete 17-alpha-hydroxylase/17, 20-lyase deficiency; Oto-palato-digital syndrome, type I; Nephrolithiasis/osteoporosis, hypophosphatemic, 2; Familial type 1 and 3 hyperlipoproteinemia; Phenotypes: CHARGE association; Fuhrmann syndrome; Hypotrichosis-lymphedema-telangiectasia syndrome; Chondrodysplasia Blomstrand type, Acroerythrokeratoderma; Slowed nerve conduction velocity, autosomal dominant; Hereditary cancer-predisposing syndrome; Craniodiaphyseal dysplasia, autosomal dominant; Spinocerebellar ataxia autosomal recessive I and 16; Proprotein convertase 1/3 deficiency, D-2-hydroxyglutaric aciduria 2; Hyperekplexia 2 and Hyperekplexia hereditary; Central core disease: Opitz G/BBB syndrome; Cystic fibrosis; Thiel-Behnke corneal dystrophy, Deficiency of bisphosphoglycerate mutase; Mitochondrial short-chain Enoyl-CoA Hydratase 1 deficiency; Ectodermal dysplasia skin fragility syndrome; Wolfram-like syndrome, autosomal dominant; Microcytic anemia; Pyruvate carboxylase deficiency; Leukocyte adhesion deficiency type I and III; Multiple endocrine neoplasia, types land 4; Transient bullous dermolysis of the newborn: Primrose syndrome; Non-small cell lung cancer; Congenital muscular dystrophy; Lipase deficiency combined; COLE-CARPENTER SYNDROME 2; Atrioventricular septal defect and common atrioventricular junction; Deficiency of xanthine oxidase, Waardenburg syndrome type 1, 4C, and 2E (with neurologic involvement); Stickler syndrome, types l(nonsyndromic ocular) and 4; Comeal fragility keratoglobus, blue sclerae and joint hypermobility; Microspherophakia; Chudley-McCullough syndrome; Epidermolysa bullosa simplex and limb girdle muscular dystrophy, simplex with mottled pigmentation, simplex with pyloric atresia, simplex, autosomal recessive, and with pyloric atresia; Rett disorder; Abnormality of neuronal migration; Growth hormone deficiency with pituitary anomalies; Leigh disease; Keratosis palmoplantaris striata 1; Weissenbacher-Zweynuller syndrome; Medium-chain acyl-coenzyme A dehydrogenase deficiency; UDPglucose-4-epimerase deficiency: susceptibility to Autism, X-linked 3; Rhegmatogenous retinal detachment, autosomal dominant; Familial febrile seizures 8; Ulna and fibula absence of with severe limb deficiency; Left ventricular noncompaction 6; Centromeric instability of chromosomes 1.9 and 16 and immunodeficiency; Hereditary diffuse leukoencephalopathy with spheroids; Cushing syndrome: Dopamine receptor d2, reduced brain density of: C-like syndrome; Renal dysplasia, retinal pigmentary dystrophy, cerebellar ataxia and skeletal dysplasia; Ovarian dysgenesis 1; Pierson syndrome; Polyneuropathy, hearing loss, ataxia, retinitis pigmentosa, and cataract, Progressive intrahepatic cholestasis; autosomal dominant, autosomal recessive, and X-linked recessive Alport syndromes; Angelman syndrome; Amish infantile epilepsy syndrome: Autoimmune lymphoproliferative syndrome, type la; Hydrocephalus: Marfanoid habitus; Bare lymphocyte syndrome type 2, complementation group E: Recessive dystrophic epidermolysis bullosa; Factor 1-I, V11, X, v and factor viii, combined deficiency of 2, xiii, a subunit, deficiency; Zonular pulverulent cataract 3; Warts, hypogammaglobulinemia, infections, and myelokathexis; Benign hereditary chorea: Deficiency of hyaluronoglucosaminidase; Microcephaly, hiatal hernia and nephrotic syndrome; Growth and mental retardation, mandibulofacial dysostosis, microcephaly, and cleft palate; Lymphedema, hereditary, id; Delayed puberty; Apparent mineralocorticoid excess, Generalized arterial calcification of infancy 2; METHYLMALONIC ACIDURIA, mut(0) TYPE; Congenital heart disease, multiple types, 2, Familial hypoplastic, glomerulocystic kidney; Cerebrooculofacioskeletal syndrome 2; Stargardt disease 1; Mental retardation, autosomal recessive 15, 44, 46, and 5; Prolidase deficiency; Methylmalonic aciduria cblB type, Oguchi disease; Endocrine-cerebroosteodysplasia; Lissencephaly 1, 2 (X-linked), 3, 6 (with microcephaly), X-linked: Somatotroph adenoma; Gamstorp-Wohlfart syndrome; Lipid proteinosis; Inclusion body myopathy 2 and 3; Enlarged vestibular aqueduct syndrome; Osteoporosis with pseudoglioma: Acquired long QT syandrome; Phenylketonuria; CHOPS syndrome, Global developmental delay; Bietti crystalline corneoretinal dystrophy; Noonan syndrome-like disorder with or without juvenile myelomonocytic leukemia; Congenital erythropoietic porphyria, Atrophia bulborum hereditaria; Paragangliomas 3; Van der Woude syndrome; Aromatase deficiency; Birk Barel mental retardation dysmorphism syndrome; Amyotrophic lateral sclerosis type 5; Methemoglobinemia types 11 and 2; Congenital stationary night blindness, type 1A, B, 1C, IE, IF, and 2A; Seizures, Thyroid cancer, follicular; Lethal congenital contracture syndrome 6; Distal hereditary motor neuronopathy type 2B: Sex cord-stromal tumor; Epileptic encephalopathy, childhood-onset, early infantile, 1, 19, 23, 25, 30, and 32; Myofibrillar myopathy 1 and ZASP-related; Cerebellar ataxia infantile with progressive external ophthalmoplegia; Purine-nucleoside phosphorylase deficiency; Forebrain defects; Epileptic encephalopathy Lennox-Gastaut type: Obesity; 4, Left ventricular noncompaction 10; Verheij syndrome, Mowat-Wilson syndrome; Odontotrichomelic syndrome, Patterned dystrophy of retinal pigment epithelium; Lig4 syndrome; Barakat syndrome; IRAK4 deficiency; Somatotroph adenoma; Branched-chain ketoacid dehydrogenase kinase deficiency; Cystinuria, Familial aplasia of the vermis; Succinyl-CoA acetoacetate transferase deficiency; Scapuloperoneal spinal muscular atrophy; Pigmentary retinal dystrophy; Glanzmann thrombasthenia; Primary open angle glaucoma juvenile onset 1; Aicardi Goutieres syndromes 1, 4, and 5; Renal dysplasia; Intrauterine growth retardation, metaphyseal dysplasia, adrenal hypoplasia congenita, and genital anomalies, Beaded hair; Short stature, onychodysplasia, facial dysmorphism, and hypotrichosis; Metachromatic leukodystrophy; Cholestanol storage disease; Three M syndrome 2; Leber congenital anaurosis 11, 12, 13, 16, 4, 7, and 9; Mandibuloacral dysplasia with type A or B lipodystrophy, atypical; Meier-Gorlin syndromes land 4; Hypotrichosis 8 and 12; Short QT syndrome 3; Ectodermal dysplasia 1 ib, Anonychia; Pseudohypoparathyroidism type 1A, Pseudopseudohvpoparathvroidism; Leber optic atrophy; Bainbridge-Ropers syndrome; Weaver syndrome; Short stature, auditory canal atresia, mandibular hypoplasia, skeletal abnormalities: Deficiency of alpha-mannosidase; Macular dystrophy, vitelliform, adult-onset; Glutaric aciduria, type 1; Gangliosidosis GM1 typel (with cardiac involvenment) 3; Mandibuloacral dysostosis; Hereditary lymphedema type I, Atrial standstill 2; Kabuki make-up syndrome; Bethlem myopathy and Bethlem myopathy 2; Myeloperoxidase deficiency, Fleck corneal dystrophy; Hereditary acrodermatitis enteropathica; Hypobetalipoproteinemia, familial, associated with apob32; Cockayne syndrome type A,; Hyperparathyroidism, neonatal severe; A taxia-telangiectasia-like disorder: Pendred syndrome; I blood group system: Familial benign pemphigus; Visceral heterotaxy 5, autosomal; Nephrogenic diabetes insipidus, Nephrogenic diabetes insipidus, X-linked; Minicore myopathy with external ophthalmoplegia; Perry syndrome; hypohidrotic/hair/tooth type, autosomal recessive: Hereditary pancreatitis; Mental retardation and microcephaly with pontine and cerebellar hypoplasia; Glycogen storage disease 0 (muscle), II (adult form), IXa2, IXc, type IA, Osteopathia striata with cranial sclerosis; Gluthathione synthetase deficiency; Brugada syndrome and Brugada syndrome 4; Endometrial carcinoma, Hypohidrotic ectodermal dysplasia with immune deficiency; Cholestasis, intrahepatic, of pregnancy 3; Bemard-Soulier syndrome, types A1 and A2 (autosomal dominant); Salla disease; Ornithine aminotransferase deficiency; PTEN hamartoma tumor syndrome; Distichiasis-lymphedema syndrome; Corticosteroid-binding globulin deficiency; Adult neuronal ceroid lipofiscinosis; Dejerine-Sottas disease; Tetraamelia, autosomal recessive; Senior-Loken syndrome 4 and 5, Glutaric acidemia IIA and IIB; Aortic aneurysm, familial thoracic 4, 6, and 9; Hyperphosphatasia with mental retardation syndrome 2, 3, and 4; Dyskeratosis congenita X-linked; Arthrogryposis, renal dysfunction, and cholestasis 2; Bannayan-Riley-Ruvalcaba syndrome; 3-Methylglutaconic aciduria; Isolated 17,20-lyase deficiency; Gorlin syndrome; Hand foot uterus syndrome; Tay-Sachs disease, B1 variant, Gm2-gangliosidosis (adult), Gm2-gangliosidosis (adult-onset); Dowling-degos disease 4; Parkinson disease 14, 15, 19 (juvenile-onset), 2, 20 (early-onset), 6, (autosomal recessive early-onset, and 9; Ataxia, sensory, autosomal dominant; Congenital microvillous atrophy; Myoclonic-Atonic Epilepsy; Tangier disease; 2-methyl-3-hydroxybutyric aciduria; Familial renal hypouricemia; Schizencephaly; Mitochondrial DNA depletion syndrome 4B, MNGIE type; Feingold syndrome 1; Renal carnitine transport defect; Familial hypercholesterolemia, Townes-Brocks-branchiootorenal-like syndrome; Griscelli syndrome type 3; Meckel-Gruber syndrome; Bullous ichthyosiform erythroderma; Neutrophil immunodeficiency syndrome; Myasthenic Syndrome, Congenital, 17, 2A (slow-channel), 4B (fast-channel), and without tubular aggregates; Microvascular complications of diabetes 7; McKusick Kaufman syndrome; Chronic granulomatous disease, autosomal recessive cytochrome b-positive, types 1 and 2; Arginino succinate lyase deficiency; Mitochondrial phosphate carrier and pyruvate carrier deficiency; Lattice corneal dystrophy Type III, Ectodermal dysplasia-syndactyly syndrome 1, Hypomyelinating leukodystrophy 7; Mental retardation, autosomal dominant 12, 13, 15, 24, 3, 30, 4, 5, 6, and 9; Generalized epilepsy with febrile seizures plus, types 1 and 2; Psoriasis susceptibility 2; Frank Ter Haar syndrome; Thoracic aortic aneurysms and aortic dissections; Crouzon syndrome; Granulosa cell tumor of the ovary; Epidermolytic palmoplantar keratoderma, Leri Weill dyschondrosteosis; 3 beta-Hydroxysteroid dehydrogenase deficiency; Familial restrictive cardiomyopathy 1; Autosomal dominant progressive external ophthalmoplegia with mitochondrial DNA deletions 1 and 3; Antley-Bixler syndrome with genital anomalies and disordered steroidogenesis; Hajdu-Cheney syndrome; Pigmented nodular adrenocortical disease, primary, 1, Episodic pain syndrome, familial, 3; Dejerine-Sottas syndrome, autosomal dominant, FG syndrome and FG syndrome 4; Dendritic cell, monocyte, B lymphocyte, and natural killer lymphocyte deficiency; Hypothyroidism, congenital, nongoitrous, 1; Miller syndrome; Nemaline myopathy 3 and 9; Oligodontia-colorectal cancer syndrome; Cold-induced sweating syndrome 1, Van Buchem disease type 2; Glaucoma 3, primary congenital, d; Citrullinemia type I and II; Nonaka myopathy; Congenital muscular dystrophy due to partial LAMA2 deficiency; Myoneural gastrointestinal encephalopathy syndrome; Leigh syndrome due to mitochondrial complex I deficiency; Medulloblastoma; Pyruvate dehydrogenase El-alpha deficiency; Carcinoma of colon; Nance-Horan syndrome, Sandhoff disease, adult and infantil types; Arthrogryposis renal dysfunction cholestasis syndrome; Autosomal recessive hypophosphatemic bone disease; Doyne honeycomb retinal dystrophy; Spinocerebellar ataxia 14, 21, 35, 40, and 6; Lewy body dementia; RRM2B-related mitochondrial disease; Brody myopathy, Megalencephaly-polymicrogyria-polydactyly-hydrocephalus syndrome 2; Usher syndrome, types 1, IB, ID, 1G, 2A, 2C, and 2D; hypocalcification type and hypomaturation type, IIA1 Amelogenesis imperfecta, Pituitary hormone deficiency, combined 1, 2, 3, and 4; Cushing symphalangism; Renal tubular acidosis, distal, autosomal recessive, with late-onset sensorineural hearing loss, or with hemolytic anemia, Infantile nephronophthisis; Juvenile polyposis syndrome; Sensory ataxic neuropathy, dysarthria, and ophthalmoparesis; Deficiency of 3-hydroxyacyl-CoA dehydrogenase, Parathyroid carcinoma; X-linked agammaglobulinemia; Megaloblastic anemia, thiamine-responsive, with diabetes mellitus and sensorineural deafness; Multiple sulfatase deficiency; Neurodegeneration with brain iron accumulation 4 and 6; Cholesterol monooxygenase (side-chain cleaving) deficiency; hemolytic anemia due to Adenylosuccinate lyase deficiency; Myoclonus with epilepsy with ragged red fibers; Pitt-Hopkins syndrome; Multiple pterygium syndrome Escobar type; Homocystinuria-Megaloblastic anemia due to defect in cobalamin metabolism. cblE complementation type; Cholecystitis; Spherocytosis types 4 and 5; Multiple congenital anomalies; Xeroderma pigmentosum, complementation group b, group D. group E. and group G; Leiner disease; Groenouw corneal dystrophy type 1; Coenzyme Q10 deficiency, primary 1, 4, and 7; Distal spinal muscular atrophy, congenital nonprogressive; Warburg micro syndrome 2 and 4; Bile acid synthesis defect, congenital, 3; Acth-independent macronodular adrenal hyperplasia 2; Acrocapitofemoral dysplasia; Paget disease of bone, familial; Severe neonatal-onset encephalopathy with microcephaly; Zimmermann-Laband syndrome and Zimmermann-Laband syndrome 2; Reifenstein syndrome; Familial hypokalemia-hypomagnesemia, Photosensitive trichothiodystrophy; Adult junctional epidermolysis bullosa; Lung cancer; Freeman-Sheldon syndrome; Hyperinsulinism-hyperammonemia syndrome; Posterior polar cataract type 2: Sclerocornea, autosomal recessive; Juvenile GM.%>1<gangliosidosis; Cohen syndrome, Hereditary Paraganglioma-Pheochromocytoma Syndromes, Neonatal insulin-dependent diabetes mellitus; Hypochondrogenesis; Floating-Harbor syndrome; Cutis laxa with osteodystrophy and with severe pulmonary, gastrointestinal, and urinary abnormalities; Congenital contractures of the limbs and face, hypotonia, and developmental delay: Dyskeratosis congenita autosomal dominant and autosomal dominant, 3; Histiocytic medullary reticulosis; Costello syndrome, Immunodeficiency 15, 16, 19, 30, 31C, 38, 40, 8, due to defect in cd3-zeta, with hyper IgM type 1 and 2, and X-Linked, with magnesium defect, Epstein-Barr vims infection, and neoplasia; Atrial septal defects 2, 4, and 7 (with or without atrioventricular conduction defects); GTP cyclohydrolase I deficiency; Talipes equinovarus; Phosphoglycerate kinase I deficiency: Tuberous sclerosis 1 and 2; Autosomal recessive congenital ichthyosis 1, 2, 3, 4A, and 4B; and Familial hypertrophic cardiomyopathy 1, 2, 3, 4, 7, 10, 23 and 24.

### 1.1.3.2 Indications by Tissue

[0820] Additional suitable diseases and disorders that can be treated by the systems and methods provided herein include, without limitation, diseases of the central nervous system (CNS) (see exemplary diseases and affected genes in Table 13), diseases of the eye (see exemplary diseases and affected genes in Table 14), diseases of the heart (see exemplary diseases and affected genes in Table 15), diseases of the hematopoietic stem cells (HSC) (see exemplary diseases and affected genes in Table 16), diseases of the kidney (see exemplary diseases and affected genes in Table 17), diseases of the liver (see exemplary diseases and affected genes in Table 18), diseases of the lung (see exemplary diseases and affected genes in Table 19), diseases of the skeletal muscle (see exemplary diseases and affected genes in Table 20), and diseases of the skin (see exemplary diseases and affected genes in Table 21). Table 22 provides exemplary protective mutations that reduce risks of the indicated diseases. In some embodiments, a Gene Writer system described herein is used to treat an indication of any of Tables 13-21. In some embodiments, the GeneWriter system modifies a target site in genomic DNA in a cell, wherein the target site is in a gene of any of Tables 13-21, e.g., in a subject having the corresponding indication listed in any of Tables 13-21. In some embodiments, the GeneWriter corrects a mutation in the gene. In some embodiments, the GeneWriter inserts a sequence that had been deleted from the gene (e.g., through a disease-causing mutation). In some embodiments, the GeneWriter deletes a sequence that had been duplicated in the gene (e.g., through a disease-causing mutation). In some embodiments, the GeneWriter replaces a mutation (e.g., a disease-causing mutation) with the corresponding wild-type sequence. In some embodiments, the mutation is a substitution, insertion, deletion, or inversion.

TABLE 13
1.1.3.2.1 CNS diseases and genes affected.

| Disease | Gene Affected |
|---|---|
| Alpha-mannosidosis | MAN2B1 |
| Ataxia-telangiectasia | ATM |
| CADASIL | NOTCH3 |
| Canavan disease | ASPA |
| Carbamoyl-phosphate synthetase 1 deficiency | CPS1 |
| CLN1 disease | PPT1 |
| CLN2 Disease | TPP1 |
| CLN3 Disease (Juvenile neuronal ceroid | CLN3 |
| lipofuscinosis, Batten Disease) | |
| Coffin-Lowry syndrome | RPS6KA3 |
| Congenital myasthenic syndrome 5 | COLQ |
| Cornelia de Lange syndrome (NIPBL) | NIPBL |
| Cornelia de Lange syndrome (SMC1A) | SMC1A |
| Dravet syndrome (SCN1A) | SCN1A |
| Glycine encephalopathy (GLDC) | GLDC |
| GM1 gangliosidosis | GLB1 |
| Huntington's Disease | HTT |
| Hydrocephalus with stenosis of the aqueduct | L1CAM |
| of Sylvius | |
| Leigh Syndrome | SURF1 |
| Metachromatic leukodystrophy (ARSA) | ARSA |
| MPS type 2 | IDS |
| MPS type 3 | Type 3a: SGSH |
| | Type 3b: NAGLU |
| Mucolipidosis IV | MCOLN1 |
| Neurofibromatosis Type 1 | NF1 |
| Neurofibromatosis type 2 | NF2 |
| Pantothenate kinase-associated neurodegeneration | PANK2 |
| Pyridoxine-dependent epilepsy | ALDH7A1 |
| Rett syndrome (MECP2) | MECP2 |
| Sandhoff disease | HEXB |
| Semantic dementia (Frontotemporal dementia) | MAPT |
| Spinocerebellar ataxia with axonal neuropathy | SETX |
| (Ataxia with Oculomotor Apraxia) | |
| Tay-Sachs disease | HEXA |
| X-linked Adrenoleukodystrophy | ABCD1 |

TABLE 14
1.1.3.2.2 Eye diseases and genes affected.

| Disease | Gene Affected |
|---|---|
| Achromatopsia | CNGB3 |
| Amaurosis Congenita (LCA1) | GUCY2D |
| Amaurosis Congenita (LCA10) | CEP290 |
| Amaurosis Congenita (LCA2) | RPE65 |
| Amaurosis Congenita (LCA8) | CRB1 |
| Choroideremia | CHM |
| Cone Rod Dystrophy (ABCA4) | ABCA4 |
| Cone Rod Dystrophy (CRX) | CRX |
| Cone Rod Dystrophy (GUCY2D) | GUCY2D |
| Cystinosis, Ocular Nonnephropathic | CTNS |
| Lattice corneal dystrophy type I | TGFBI |
| Macular Corneal Dystrophy (MCD) | CHST6 |
| Optic Atrophy | OPA1 |
| Retinitis Pigmentosa (AR) | USH2A |
| Retinitis Rigmentosa (AD) | RHO |
| Stargardt Disease | ABCA4 |
| Vitelliform Macular Dystrophy | BEST1; PRPH2 |

TABLE 15
1.1.3.2.3 Heart diseases and genes affected.

| | Gene |
|---|---|
| Disease | Affected |
| Arrhythmogenic right ventricular cardiomyopathy (ARVC) | PKP2 |
| Barth syndrome | TAZ |
| Becker muscular dystrophy | DMD |
| Brugada syndrome | SCN5A |
| Catecholaminergic polymorphic ventricular tachycardia | RYR2 |
| (RYR2) | |
| Dilated cardiomyopathy (LMNA) | LMNA |
| Dilated cardiomyopathy (TTN) | TTN |
| Duchenne muscular dystrophy | DMD |
| Emery-Dreifuss Muscular Dystrophy Type I | EMD |
| Familial hypertrophic cardiomyopathy | MYH7 |
| Familial hypertrophic cardiomyopathy | MYBPC3 |
| Jervell Lange-Nielsen syndrome | KCNQ1 |
| LCHAD deficiency | HADHA |
| Limb-girdle muscular dystrophy type 1B (Emery-Dreifuss | LMNA |
| EDMD2) | |
| Limb-girdle muscular dystrophy, type 2D | SGCA |
| Long QT syndrome 1 (Romano Ward) | KCNQ1 |

TABLE 16
1.1.3.2.4 HSC diseases and genes affected.

| Disease | Gene Affected |
|---|---|
| ADA-SCID | ADA |
| Adrenoleukodystrophy (CALD) | ABCD1 |
| Alpha-mannosidosis | MAN2B1 |
| Chronic granulomatous disease | CYBB; CYBA; |
| | NCF1; NCF2; NCF4 |
| Common variable immunodeficiency | TNFRSF13B |
| Fanconi anemia | FANCA; FANCC; |
| | FANCG |
| Gaucher disease | GBA |
| Globoid cell leukodystrophy (Krabbe disease) | GALC |
| Hemophagocytic lymphohistiocytosis | PRF1; STX11; |
| | STXBP2; UNC13D |
| IL-7R SCID | IL7R |
| JAK-3 SCID | JAK3 |
| Malignant infantile osteopetrosis- autosomal | TCIRG1; Many genes |
| recessive osteopetrosis | implicated |
| Metachromatic leukodystrophy | ARSA; PSAP |
| MPS 1S (Scheie syndrome) | IDUA |
| MPS2 | IDS |
| MPS7 | GUSB |
| Mucolipidosis II | GNPTAB |
| Niemann-Pick disease A and B | SMPD1 |
| Niemann-Pick disease C | NPC1 |
| Paroxysmal Nocturnal Hemoglobinuria | PIGA |
| Pompe disease | GAA |
| Pyruvate kinase deficiency (PKD) | PKLR |
| RAG ½ Deficiency (SCID with granulomas) | RAG1/RAG2 |
| Severe Congenital Neutropenia | ELANE; HAX1 |
| Sickle cell disease (SCD) | HBB |
| Tay Sachs | HEXA |
| Thalassemia | HBB |
| Wiskott-Aldrich Syndrome | WAS |
| X-linked agammaglobulinemia | BTK |
| X-linked SCID | IL2RG |

TABLE 17
1.1.3.2.5 Kidney diseases and genes affected.

| | Gene |
|---|---|
| Disease | Affected |
| Alport syndrome | COL4A5 |
| Autosomal dominant polycystic kidney disease (PKD1) | PKD1 |
| Autosomal dominant polycystic kidney disease (PKD2) | PDK2 |
| Autosomal dominant tubulointerstitial kidney disease (MUC1) | MUC1 |
| Autosomal dominant tubulointerstitial kidney disease | UMOD |
| (UMOD) | |
| Autosomal recessive polycystic kidney disease | PKHD1 |
| Congenital nephrotic syndrome | NPHS2 |
| Cystinosis | CTNS |

TABLE 18
1.1.3.2.6 Liver diseases and genes affected.

| Disease | Gene Affected |
|---|---|
| Acute intermittent porphyria | HMBS |
| Alagille syndrome | JAG1 |
| Alpha-1-antitrypsin deficiency | SERPINA1 |
| Carbamoyl phosphate synthetase I | CPS1 |
| deficiency | |
| Citrullinemia I | ASS1 |
| Crigler-Najjar | UGT1A1 |
| Fabry | LPL |
| Familial chylomicronemia syndrome | GLA |
| Gaucher | GBE1 |
| GSD IV | GBA |
| Heme A | F8 |
| Heme B | F9 |
| Hereditary amyloidosis (hTTR) | TTR |
| Hereditary angioedema | SERPING1 |
| | (KLKB1 for CRISPR) |
| HoFH | LDLRAP1 |
| Hypercholesterolemia | PCSK9 |
| Methylmalonic acidemia | MMUT |
| MPS II | IDS |
| MPS III | Type IIIa: SGSH |
| | Type IIIb: NAGLU |
| | Type IIIc: HGSNAT |
| | Type IIId: GNS |
| MPS IV | Type IVA: GALNS |
| | Type IVB: GLB1 |
| MPS VI | ARSB |
| MSUD | Type Ia: BCKDHA |
| | Type Ib: BCKDHB |
| | Type II: DBT |
| OTC Deficiency | OTC |
| Polycystic Liver Disease | PRKCSH |
| Pompe | GAA |
| Primary Hyperoxaluria 1 | AGXT (HAO1 or |
| | LDHA for CRISPR) |
| Progressive familial intrahepatic | ATP8B1 |
| cholestasis type 1 | |
| Progressive familial intrahepatic | ABCB11 |
| cholestasis type 2 | |
| Progressive familial intrahepatic | ABCB4 |
| cholestasis type 3 | |
| Propionic acidemia | PCCB; PCCA |
| Wilson's Disease | ATP7B |
| Glycogen storage disease, Type 1a | G6PC |
| Glycogen storage disease, Type IIIb | AGL |
| Isovaleric acidemia | IVD |
| Wolman disease | LIPA |

TABLE 19
1.1.3.2.7 Lung diseases and genes affected.

| Disease | Gene Affected |
|---|---|
| Alpha-1 antitrypsin deficiency | SERPINA1 |
| Cystic fibrosis | CFTR |
| Primary ciliary dyskinesia | DNAI1 |
| Primary ciliary dyskinesia | DNAH5 |
| Primary pulmonary hypertension I | BMPR2 |
| Surfactant Protein B (SP-B) Deficiency (pulmonary | SFTPB |
| surfactant metabolism dysfunction 1) | |

TABLE 20
1.1.3.2.8 Skeletal muscle diseases and genes affected.

| Disease | Gene Affected |
|---|---|
| Becker muscular dystrophy | DMD |
| Becker myotonia | CLCN1 |
| Bethlem myopathy | COL6A2 |
| Centronuclear myopathy, X-linked (myotubular) | MTM1 |
| Congenital myasthenic syndrome | CHRNE |
| Duchenne muscular dystrophy | DMD |
| Emery-Dreifuss muscular dystrophy, AD | LMNA |
| Facioscapulohumeral Muscular Dystrophy | DUX4 - D4Z4 |
| | chromosomal region |
| Hyperkalemic periodic paralysis | SCN4A |
| Hypokalemic periodic paralysis | CACNA1S |
| Limb-girdle muscular dystrophy 2A | CAPN3 |
| Limb-girdle muscular dystrophy 2B | DYSF |
| Limb-girdle muscular dystrophy, type 2D | SGCA |
| Miyoshi muscular dystrophy 1 | DYSF |
| Paramyotonia congenita | SCN4A |
| Thomsen myotonia | CLCN1 |
| VCP myopathy (IBMPFD) 1 | VCP |

TABLE 21
1.1.3.2.9 Skin diseases and genes affected.

| Disease | Gene Affected |
|---|---|
| Epidermolysis Bullosa Dystrophica Dominant | COL7A1 |
| Epidermolysis Bullosa Dystrophica Recessive | COL7A1 |
| (Hallopeau-Siemens) | |
| Epidermolysis Bullosa Junctional | LAMB3 |
| Epidermolysis Bullosa Simplex | KRT5; KRT14 |
| Epidermolytic Ichthyosis | KRT1; KRT10 |
| Hailey-Hailey Disease | ATP2C1 |
| Lamellar Ichthyosis/Nonbullous Congenital | TGM1 |
| Ichthyosiform Erythroderma (ARCI) | |
| Netherton Syndrome | SPINK5 |

### 1.1.3.3 Regulatory Edits

[0821] In some embodiments, the systems or methods provided herein can be used to introduce a regulatory edit. In some embodiments, the regulatory edit is introduced to a regulatory sequence of a gene, for example, a gene promoter, gene enhancer, gene repressor, or a sequence that regulates gene splicing. In some embodiments, the regulatory edit increases or decreases the expression level of a target gene. In some embodiments, the target gene is the same as the gene containing a disease-causing mutation. In some embodiment, the target gene is different from the gene containing a disease-causing mutation. For example, the systems or methods provided herein can be used to upregulate the expression of fetal hemoglobin by introducing a regulatory edit at the promoter of bcl11a, thereby treating sickle cell disease.

### 1.1.3.4 Exemplary Heterologous Object Sequences

[0822] In some embodiments, the systems or methods provided herein comprise a heterologous object sequence, wherein the heterologous object sequence or a reverse complementary sequence thereof, encodes a protein (e.g., an antibody) or peptide. In some embodiments, the therapy is one approved by a regulatory agency such as FDA.

[0823] In some embodiments, the protein or peptide is a protein or peptide from the THPdb database (Usmani et al. PLoS One 12(7):e0181748 (2017), herein incorporated by reference in its entirety. In some embodiments, the protein or peptide is a protein or peptide disclosed in Table 28. In some embodiments, the systems or methods disclosed herein, for example, those comprising Gene Writers, may be used to integrate an expression cassette for a protein or peptide from Table 28 into a host cell to enable the expression of the protein or peptide in the host. In some embodiments, the sequences of the protein or peptide in the first column of Table 28 can be found in the patents or applications provided in the third column of Table 28, incorporated by reference in their entireties.

[0824] In some embodiments, the protein or peptide is an antibody disclosed in Table 1 of Lu et al. J Biomed Sci 27(1):1 (2020), herein incorporated by reference in its entirety. In some embodiments, the protein or peptide is an antibody disclosed in Table 29. In some embodiments, the systems or methods disclosed herein, for example, those comprising Gene Writers, may be used to integrate an expression cassette for an antibody from Table 29 into a host cell to enable the expression of the antibody in the host. In some embodiments, a system or method described herein is used to express an agent that binds a target of column 2 of Table 29 (e.g., a monoclonal antibody of column 1 of Table 29) in a subject having an indication of column 3 of Table 29.

TABLE 28
1.1.3.4.1 Exemplary protein and peptide therapeutics.

| Therapeutic peptide | Category | Patent Number |
|---|---|---|
| Lepirudin | Antithrombins and Fibrinolytic Agents | CA1339104 |
| Cetuximab | Antineoplastic Agents | CA1340417 |
| Dor se alpha | Enzymes | CA2184581 |
| Denileukin diftitox | Antineoplastic Agents | |
| Etanercept | Immunosuppressive Agents | CA2476934 |
| Bivalirudin | Antithrombins | U.S. Pat. No. 7,582,727 |
| Leuprolide | Antineoplastic Agents | |
| Peginterferon alpha-2a | Immunosuppressive Agents | CA2203480 |
| Alteplase | Thrombolytic Agents | |
| Interferon alpha-n1 | Antiviral Agents | |
| Darbepoetin alpha | Anti-anemic Agents | CA2165694 |
| Reteplase | Fibrinolytic Agents | CA2107476 |
| Epoetin alpha | Hematinics | CA1339047 |
| Salmon Calcitonin | Bone Density Conservation Agents | U.S. Pat. No. 6,440,392 |
| Interferon alpha-n3 | Immunosuppressive Agents | |
| Pegfilgrastim | Immunosuppressive Agents | CA1341537 |
| Sargramostim | Immunosuppressive Agents | CA1341150 |
| Secretin | Diagnostic Agents | |
| Peginterferon alpha-2b | Immunosuppressive Agents | CA1341567 |
| Asparaginase | Antineoplastic Agents | |
| Thyrotropin alpha | Diagnostic Agents | U.S. Pat. No. 5,840,566 |
| Antihemophilic Factor | Coagulants and Thrombotic agents | CA2124690 |
| A kinra | Antirheumatic Agents | CA2141953 |
| Gramicidin D | Anti-Bacterial Agents | |
| Intravenous Immunoglobulin | Immunologic Factors | |
| Anistreplase | Fibrinolytic Agents | |
| Insulin Regular | Antidiabetic Agents | |
| Tenecteplase | Fibrinolytic Agents | CA2129660 |
| Menotropins | Fertility Agents | |
| Interferon gamma-1b | Immunosuppressive Agents | U.S. Pat. No. 6,936,695 |
| Interferon alpha-2a, Recombinant | | CA2172664 |
| Coagulation factor VIIa | Coagulants | |
| Oprelvekin | Antineoplastic Agents | |
| Palifermin | Anti-Mucositis Agents | |
| Glucagon recombinant | Hypoglycemic Agents | |
| Aldesleukin | Antineoplastic Agents | |
| Botulinum Toxin Type B | Antidystonic Agents | |
| Omalizumab | Anti-Allergic Agents | CA2113813 |
| Lutropin alpha | Fertility Agents | U.S. Pat. No. 5,767,251 |
| Insulin Lispro | Hypoglycemic Agents | U.S. Pat. No. 5,474,978 |
| Insulin Glargine | Hypoglycemic Agents | U.S. Pat. No. 7,476,652 |
| Collage se | | |
| Rasburicase | Gout Suppressants | CA2175971 |
| Adalimumab | Antirheumatic Agents | CA2243459 |
| Imiglucerase | Enzyme Replacement Agents | U.S. Pat. No. 5,549,892 |
| Abciximab | Anticoagulants | CA1341357 |
| Alpha-1-protei se inhibitor | Serine Proteinase Inhibitors | |
| Pegaspargase | Antineoplastic Agents | |
| Interferon beta-1a | Antineoplastic Agents | CA1341604 |
| Pegademase bovine | Enzyme Replacement Agents | |
| Human Serum Albumin | Serum substitutes | U.S. Pat. No. 6,723,303 |
| Eptifibatide | Platelet Aggregation Inhibitors | U.S. Pat. No. 6,706,681 |
| Serum albumin iodo ted | Diagnostic Agents | |
| Infliximab | Antirheumatic Agents, Anti- | CA2106299 |
| | Inflammatory Agents, Non- | |
| | Steroidal, Dermatologic Agents, | |
| | Gastrointestinal Agents and | |
| | Immunosuppressive Agents | |
| Follitropin beta | Fertility Agents | U.S. Pat. No. 7,741,268 |
| Vasopressin | Antidiuretic Agents | |
| Interferon beta-1b | Adjuvants, Immunologic and | CA1340861 |
| | Immunosuppressive Agents | |
| Interferon alphacon-1 | Antiviral Agents and | CA1341567 |
| | Immunosuppressive Agents | |
| Hyaluronidase | Adjuvants, Anesthesia and | |
| | Permeabilizing Agents | |
| Insulin, porcine | Hypoglycemic Agents | |
| Trastuzumab | Antineoplastic Agents | CA2103059 |
| Rituximab | Antineoplastic Agents, Immunologic | CA2149329 |
| | Factors and Antirheumatic Agents | |
| Basiliximab | Immunosuppressive Agents | CA2038279 |
| Muromo b | Immunologic Factors and | |
| | Immunosuppressive Agents | |
| Digoxin Immune Fab (Ovine) | Antidotes | |
| Ibritumomab | | CA2149329 |
| Daptomycin | | U.S. Pat. No. 6,468,967 |
| Tositumomab | | |
| Pegvisomant | Hormone Replacement Agents | U.S. Pat. No. 5,849,535 |
| Botulinum Toxin Type A | Neuromuscular Blocking Agents, Anti- | CA2280565 |
| | Wrinkle Agents and Antidystonic Agents | |
| Pancrelipase | Gastrointestinal Agents and Enzyme | |
| | Replacement Agents | |
| Streptoki se | Fibrinolytic Agents and Thrombolytic | |
| | Agents | |
| Alemtuzumab | | CA1339198 |
| Alglucerase | Enzyme Replacement Agents | |
| Capromab | Indicators, Reagents and Diagnostic | |
| | Agents | |
| Laronidase | Enzyme Replacement Agents | |
| Urofollitropin | Fertility Agents | U.S. Pat. No. 5,767,067 |
| Efalizumab | Immunosuppressive Agents | |
| Serum albumin | Serum substitutes | U.S. Pat. No. 6,723,303 |
| Choriogonadotropin alpha | Fertility Agents and Gonadotropins | U.S. Pat. No. 6,706,681 |
| Antithymocyte globulin | Immunologic Factors and | |
| | Immunosuppressive Agents | |
| Filgrastim | Immunosuppressive Agents, | CA1341537 |
| | Antineutropenic Agents and | |
| | Hematopoietic Agents | |
| Coagulation factor ix | Coagulants and Thrombotic Agents | |
| Becaplermin | Angiogenesis Inducing Agents | CA1340846 |
| Agalsidase beta | Enzyme Replacement Agents | CA2265464 |
| Interferon alpha-2b | Immunosuppressive Agents | CA1341567 |
| Oxytocin | Oxytocics, Anti-tocolytic Agents | |
| | and Labor Induction Agents | |
| Enfuvirtide | HIV Fusion Inhibitors | U.S. Pat. No. 6,475,491 |
| Palivizumab | Antiviral Agents | CA2197684 |
| Daclizumab | Immunosuppressive Agents | |
| Bevacizumab | Angiogenesis Inhibitors | CA2286330 |
| Arcitumomab | Diagnostic Agents | U.S. Pat. No. 8,420,081 |
| Arcitumomab | Diagnostic Agents | U.S. Pat. No. 7,790,142 |
| Eculizumab | | CA2189015 |
| Panitumumab | | |
| Ranibizumab | Ophthalmics | CA2286330 |
| Idursulfase | Enzyme Replacement Agents | |
| Alglucosidase alpha | Enzyme Replacement Agents | CA2416492 |
| Exe tide | Hypoglycemic Agents | U.S. Pat. No. 6,872,700 |
| Mecasermin | | U.S. Pat. No. 5,681,814 |
| Pramlintide | | U.S. Pat. No. 5,686,411 |
| Galsulfase | Enzyme Replacement Agents | |
| Abatacept | Antirheumatic Agents and | CA2110518 |
| | Immunosuppressive Agents | |
| Cosyntropin | Hormones and Diagnostic Agents | |
| Corticotropin | | |
| Insulin aspart | Hypoglycemic Agents and | U.S. Pat. No. 5,866,538 |
| | Antidiabetic Agents | |
| Insulin detemir | Antidiabetic Agents | U.S. Pat. No. 5,750,497 |
| Insulin glulisine | Antidiabetic Agents | U.S. Pat. No. 6,960,561 |
| Pegaptanib | Intended for the prevention of | |
| | respiratory distress syndrome | |
| | (RDS) in premature infants at | |
| | high risk for RDS. | |
| Nesiritide | | |
| Thymalphasin | | |
| Defibrotide | Antithrombins | |
| tural alpha interferon | | |
| OR multiferon | | |
| Glatiramer acetate | | |
| Preotact | | |
| Teicoplanin | Anti-Bacterial Agents | |
| Ca kinumab | Anti-Inflammatory Agents and | |
| | Monoclonal antibodies | |
| Ipilimumab | Antineoplastic Agents and | CA2381770 |
| | Monoclonal antibodies | |
| Sulodexide | Antithrombins and Fibrinolytic | |
| | Agents and Hypoglycemic Agents | |
| | and Anticoagulants and | |
| | Hypolipidemic Agents | |
| Tocilizumab | | CA2201781 |
| Teriparatide | Bone Density Conservation Agents | U.S. Pat. No. 6,977,077 |
| Pertuzumab | Monoclonal antibodies | CA2376596 |
| Rilo cept | Immunosuppressive Agents | U.S. Pat. No. 5,844,099 |
| Denosumab | Bone Density Conservation Agents | CA2257247 |
| | and Monoclo 1 antibodies | |
| Liraglutide | | U.S. Pat. No. 6,268,343 |
| Golimumab | Antipsoriatic Agents and Monoclo 1 | |
| | antibodies andTNF inhibitor | |
| Belatacept | Antirheumatic Agents and | |
| | Immunosuppressive Agents | |
| Buserelin | | |
| Velaglucerase alpha | Enzymes | U.S. Pat. No. 7,138,262 |
| Tesamorelin | | U.S. Pat. No. 5,861,379 |
| Brentuximab vedotin | | |
| Taliglucerase alpha | Enzymes | |
| Belimumab | Monoclonal antibodies | |
| Aflibercept | Antineoplastic Agents and Ophthalmics | U.S. Pat. No. 7,306,799 |
| Asparagi se erwinia chrysanthemi | Enzymes | |
| Ocriplasmin | Ophthalmics | |
| Glucarpidase | Enzymes | |
| Teduglutide | | U.S. Pat. No. 5,789,379 |
| Raxibacumab | Anti-Infective Agents and Monoclonal | |
| | antibodies | |
| Certolizumab pegol | TNF inhibitor | CA2380298 |
| Insulin, isophane | Hypoglycemic Agents and Antidiabetic Agents | |
| Epoetin zeta | | |
| Obinutuzumab | Antineoplastic Agents | |
| Fibrinolysin aka plasmin | | U.S. Pat. No. 3,234,106 |
| Follitropin alpha | | |
| Romiplostim | Colony-Stimulating Factors and | |
| | Thrombopoietic Agents | |
| Luci ctant | Pulmonary surfactants | U.S. Pat. No. 5,407,914 |
| talizumab | Immunosuppressive agents | |
| Aliskiren | Renin inhibitor | |
| Ragweed Pollen Extract | | |
| Secukinumab | Inhibitor | US20130202610 |
| Somatotropin Recombi nt | Hormone Replacement Agents | CA1326439 |
| Drotrecogin alpha | Antisepsis | CA2036894 |
| Alefacept | Dermatologic and Immunosupressive agents | |
| OspA lipoprotein | Vaccines | |
| Uroki se | | U.S. Pat. No. 4,258,030 |
| Abarelix | Anti-Testosterone Agents | U.S. Pat. No. 5,968,895 |
| Sermorelin | Hormone Replacement Agents | |
| Aprotinin | | U.S. Pat. No. 5,198,534 |
| Gemtuzumab ozogamicin | Antineoplastic agents and Immunotoxins | U.S. Pat. No. 5,585,089 |
| Satumomab Pendetide | Diagnostic Agents | |
| Albiglutide | Drugs used in diabetes; alimentary tract and | |
| | metabolism; blood glucose lowering drugs, | |
| | excl. insulins. | |
| Alirocumab | | |
| Ancestim | | |
| Antithrombin alpha | | |
| Antithrombin III human | | |
| Asfotase alpha | Enzymes Alimentary Tract and Metabolism | |
| Atezolizumab | | |
| Autologous cultured chondrocytes | | |
| Beractant | | |
| Bli tumomab | Antineoplastic Agents Immunosuppressive | US20120328618 |
| | Agents Monoclonal antibodies Antineoplastic | |
| | and Immunomodulating Agents | |
| C1 Esterase Inhibitor (Human) | | |
| Coagulation Factor XIII A-Subunit | | |
| (Recombi nt) | | |
| Conestat alpha | | |
| Daratumumab | Antineoplastic Agents | |
| Desirudin | | |
| Dulaglutide | Hypoglycemic Agents; Drugs Used in Diabetes; | |
| | AlimentaryTract and Metabolism; Blood Glucose | |
| | Lowering Drugs, Excl.Insulins | |
| Elosulfase alpha | Enzymes; Alimentary Tract and Metabolism | |
| Elotuzumab | | US2014055370 |
| Evolocumab | Lipid Modifying Agents, Plain; Cardiovascular | |
| | System | |
| Fibrinogen Concentrate (Human) | | |
| Filgrastim-sndz | | |
| Gastric intrinsic factor | | |
| Hepatitis B immune globulin | | |
| Human calcitonin | | |
| Human clostridium tetani | | |
| toxoid immune globulin | | |
| Human rabies virus | | |
| immune globulin | | |
| Human Rho(D) immune | | |
| globulin | | |
| Hyaluronidase (Human | | U.S. Pat. No. 7,767,429 |
| Recombi nt) | | |
| Idarucizumab | Anticoagulant | |
| Immune Globulin Human | Immunologic Factors; | |
| | Immunosuppressive Agents; | |
| | Anti-Infective Agents | |
| Vedolizumab | Immunosupressive agent, | US2012151248 |
| | Antineoplastic agent | |
| Ustekinumab | Deramtologic agent, | |
| | Immunosuppressive agent, | |
| | antineoplastic agent | |
| Turoctocog alpha | | |
| Tuberculin Purified Protein | | |
| Derivative | | |
| Simoctocog alpha | Antihaemorrhagics: blood | |
| | coagulation factor VIII | |
| Siltuximab | Antineoplastic and | U.S. Pat. No. 7,612,182 |
| | Immunomodulating Agents, | |
| | Immunosuppressive Agents | |
| Sebelipase alpha | Enzymes | |
| Sacrosidase | Enzymes | |
| Ramucirumab | Antineoplastic and | US2013067098 |
| | Immunomodulating Agents | |
| Prothrombin complex | | |
| concentrate | | |
| Poractant alpha | Pulmonary Surfactants | |
| Pembrolizumab | Antineoplastic and | US2012135408 |
| | Immunomodulating Agents | |
| Peginterferon beta-1a | | |
| Ofatumumab | Antineoplastic and | U.S. Pat. No. 8,337,847 |
| | Immunomodulating Agents | |
| Obiltoxaximab | | |
| Nivolumab | Antineoplastic and | US2013173223 |
| | Immunomodulating Agents | |
| Necitumumab | | |
| Metreleptin | | US20070099836 |
| Methoxy polyethylene | | |
| glycol-epoetin beta | | |
| Mepolizumab | Antineoplastic and Immunomodulating | US2008134721 |
| | Agents, Immunosuppressive Agents, | |
| | Interleukin Inhibitors | |
| Ixekizumab | | |
| Insulin Pork | Hypoglycemic Agents, Antidiabetic Agents | |
| Insulin Degludec | | |
| Insulin Beef | | |
| Thyroglobulin | Hormone therapy | U.S. Pat. No. 5,099,001 |
| Anthrax immune globulin | Plasma derivative | |
| human | | |
| Anti-inhibitor coagulant | Blood Coagulation Factors, Antihemophilic | |
| complex | Agent | |
| Anti-thymocyte Globulin | Antibody | |
| (Equine) | | |
| Anti-thymocyte Globulin | Antibody | |
| (Rabbit) | | |
| Brodalumab | Antineoplastic and Immunomodulating | |
| | Agents | |
| C1 Esterase Inhibitor | Blood and Blood Forming Organs | |
| (Recombinant) | | |
| Ca kinumab | Antineoplastic and Immunomodulating | |
| | Agents | |
| Chorionic Gonadotropin | Hormones | U.S. Pat. No. 6,706,681 |
| (Human) | | |
| Chorionic Gonadotropin | Hormones | U.S. Pat. No. 5,767,251 |
| (Recombi nt) | | |
| Coagulation factor X | Blood Coagulation Factors | |
| human | | |
| Dinutuximab | Antibody, Immunosuppresive | US20140170155 |
| | agent, Antineoplastic agent | |
| Efmoroctocog alpha | Antihemophilic Factor | |
| Factor IX Complex | Antihemophilic agent | |
| (Human) | | |
| Hepatitis A Vaccine | Vaccine | |
| Human Varicella-Zoster | Antibody | |
| Immune Globulin | | |
| Ibritumomab tiuxetan | Antibody, Immunosuppressive Agents | CA2149329 |
| Lenograstim | Antineoplastic and Immunomodulating | |
| | Agents | |
| Pegloticase | Enzymes | |
| Protamine sulfate | Heparin Antagonists, Hematologic Agents | |
| Protein S human | Anticoagulant plasma protein | |
| Sipuleucel-T | Antineoplastic and | U.S. Pat. No. 8,153,120 |
| | Immunomodulating Agents | |
| Somatropin recombi nt | Hormones, Hormone Substitutes, | CA1326439, CA2252535, |
| | and Hormone Antagonists | U.S. Pat. No. 5,288,703, |
| | | U.S. Pat. No. 5,849,700, |
| | | U.S. Pat. No. 5,849,704, |
| | | U.S. Pat. No. 5,898,030, |
| | | U.S. Pat. No. 6,004,297, |
| | | U.S. Pat. No. 6,152,897, |
| | | U.S. Pat. No. 6,235,004, |
| | | U.S. Pat. No. 6,899,699 |
| Susoctocog alpha | Blood coagulation factors, | |
| | Antihemorrhagics | |
| Thrombomodulin alpha | Anticoagulant agent, Antiplatelet agent | |

TABLE 29
1.1.3.4.2 Exemplary monoclonal antibody therapies.

| mAb | Target | Indication |
|---|---|---|
| Muromonab-CD3 | CD3 | Kidney transplant rejection |
| Abciximab | GPIIb/IIIa | Prevention of blood clots in |
| | | angioplasty |
| Rituximab | CD20 | Non-Hodgkin lymphoma |
| Palivizumab | RSV | Prevention of respiratory |
| | | syncytial virus infection |
| Infliximab | TNFα | Crohn's disease |
| Trastuzumab | HER2 | Breast cancer |
| Alemtuzumab | CD52 | Chronic myeloid leukemia |
| Adalimumab | TNFα | Rheumatoid arthritis |
| Ibritumomab | CD20 | Non-Hodgkin lymphoma |
| tiuxetan | | |
| Omalizumab | IgE | Asthma |
| Cetuximab | EGFR | Colorectal cancer |
| Bevacizumab | VEGF-A | Colorectal cancer |
| Natalizumab | ITGA4 | Multiple sclerosis |
| Panitumumab | EGFR | Colorectal cancer |
| Ranibizumab | VEGF-A | Macular degeneration |
| Eculizumab | CS | Paroxysmal nocturnal |
| | | hemoglobinuria |
| Certolizumab | TNFα | Crohn's disease |
| pegol | | |
| Ustekinumab | IL-12/23 | Psoriasis |
| Canakinumab | IL-1β | Muckle-Wells syndrome |
| Golimumab | TNFα | Rheumatoid and psoriatic |
| | | arthritis, ankylosing spondylitis |
| Ofatumumab | CD20 | Chronic lymphocytic leukemia |
| Tocilizumab | IL-6R | Rheumatoid arthritis |
| Denosumab | RANKL | Bone loss |
| Belimumab | BLyS | Systemic lupus erythematosus |
| Ipilimumab | CTLA-4 | Metastatic melanoma |
| Brentuximab | CD30 | Hodgkin lymphoma, systemic |
| vedotin | | anaplastic large cell lymphoma |
| Pertuzumab | HER2 | Breast Cancer |
| Trastuzumab | HER2 | Breast cancer |
| emtansine | | |
| Raxibacumab | B. anthrasis PA | Anthrax infection |
| Obinutuzumab | CD20 | Chronic lymphocytic leukemia |
| Siltuximab | IL-6 | Castleman disease |
| Ramucirumab | VEGFR2 | Gastric cancer |
| Vedolizumab | α4β7 | Ulcerative colitis, Crohn |
| | integrin | disease |
| Blinatumomab | CD19, CD3 | Acute lymphoblastic leukemia |
| Nivolumab | PD-1 | Melanoma, non-small cell |
| | | lung cancer |
| Pembrolizumab | PD-1 | Melanoma |
| Idarucizumab | Dabigatran | Reversal of dabigatran- |
| | | induced anticoagulation |
| Necitumumab | EGFR | Non-small cell lung cancer |
| Dinutuximab | GD2 | Neuroblastoma |
| Secukinumab | IL-17α | Psoriasis |
| Mepolizumab | IL-5 | Severe eosinophilic asthma |
| Alirocumab | PCSK9 | High cholesterol |
| Evolocumab | PCSK9 | High cholesterol |
| Daratumumab | CD38 | Multiple myeloma |
| Elotuzumab | SLAMF7 | Multiple myeloma |
| Ixekizumab | IL-17α | Psoriasis |
| Reslizumab | IL-5 | Asthma |
| Olaratumab | PDGFRα | Soft tissue sarcoma |
| Bezlotoxumab | Clostridium | Prevention of Clostridium |
| | difficile | difficile infection recurrence |
| | enterotoxin B | |
| Atezolizumab | PD-L1 | Bladder cancer |
| Obiltoxaximab | B. anthrasis PA | Prevention of inhalational |
| | | anthrax |
| Inotuzumab | CD22 | Acute lymphoblastic |
| ozogamicin | | leukemia |
| Brodalumab | IL-17R | Plaque psoriasis |
| Guselkumab | IL-23 p19 | Plaque psoriasis |
| Dupilumab | IL-4Rα | Atopic dermatitis |
| Sarilumab | IL-6R | Rheumatoid arthritis |
| Avelumab | PD-L1 | Merkel cell carcinoma |
| Ocrelizumab | CD20 | Multiple sclerosis |
| Emicizumab | Factor IXa, X | Hemophilia A |
| Benralizumab | IL-5Rα | Asthma |
| Gemtuzumab | CD33 | Acute myeloid leukemia |
| ozogamicin | | |
| Durvalumab | PD-L1 | Bladder cancer |
| Burosumab | FGF23 | X-linked hypophosphatemia |
| Lanadelumab | Plasma | Hereditary angioedema |
| | kallikrein | attacks |
| Mogamulizumab | CCR4 | Mycosis fungoides or |
| | | Sézary syndrome |
| Erenumab | CGRPR | Migraine prevention |
| Galcanezumab | CGRP | Migraine prevention |
| Tildrakizumab | IL-23 p19 | Plaque psoriasis |
| Cemiplimab | PD-1 | Cutaneous squamous cell |
| | | carcinoma |
| Emapalumab | IFNγ | Primary hemophagocytic |
| | | lymphohistiocytosis |
| Fremanezumab | CGRP | Migraine prevention |
| Ibalizumab | CD4 | HIV infection |
| Moxetumomab | CD22 | Hairy cell leukemia |
| pasudodox | | |
| Ravulizumab | C5 | Paroxysmal nocturnal |
| | | hemoglobinuria |
| Caplacizumab | von Willebrand | Acquired thrombotic |
| | factor | thrombocytopenia purpura |
| Romosozumab | Sclerostin | Osteoporosis in |
| | | postmenopausal women at |
| | | increased risk of fracture |
| Risankizumab | IL-23 p19 | Plaque psoriasis |
| Polatuzumab | CD79β | Diffuse large B-cell |
| vedotin | | lymphoma |
| Brolucizumab | VEGF-A | Macular degeneration |
| Crizanlizumab | P-selectin | Sickle cell disease |

### 1.2 Plant-modification Methods

[0825] Gene Writer systems described herein may be used to modify a plant or a plant part (e.g., leaves, roots, flowers, fruits, or seeds), e.g., to increase the fitness of a plant.

### A. Delivery to a Plant

[0826] Provided herein are methods of delivering a Gene Writer system described herein to a plant. Included are methods for delivering a Gene Writer system to a plant by contacting the plant, or part thereof, with a Gene Writer system. The methods are useful for modifying the plant to, e.g., increase the fitness of a plant.

[0827] More specifically, in some embodiments, a nucleic acid described herein (e.g., a nucleic acid encoding a GeneWriter) may be encoded in a vector, e.g., inserted adjacent to a plant promoter, e.g., a maize ubiquitin promoter (ZmUBI) in a plant vector (e.g., pHUC411). In some embodiments, the nucleic acids described herein are introduced into a plant (e.g., japonica rice) or part of a plant (e.g., a callus of a plant) via agrobacteria. In some embodiments, the systems and methods described herein can be used in plants by replacing a plant gene (e.g., hygromycin phosphotransferase (HPT)) with a null allele (e.g., containing a base substitution at the start codon). Systems and methods for modifying a plant genome are described in Xu et. al. Development of plant prime-editing systems for precise genome editing, 2020, Plant Communications.

[0828] In one aspect, provided herein is a method of increasing the fitness of a plant, the method including delivering to the plant the Gene Writer system described herein (e.g., in an effective amount and duration) to increase the fitness of the plant relative to an untreated plant (e.g., a plant that has not been delivered the Gene Writer system).

[0829] An increase in the fitness of the plant as a consequence of delivery of a Gene Writer system can manifest in a number of ways, e.g., thereby resulting in a better production of the plant, for example, an improved yield, improved vigor of the plant or quality of the harvested product from the plant, an improvement in pre- or post-harvest traits deemed desirable for agriculture or horticulture (e.g., taste, appearance, shelf life), or for an improvement of traits that otherwise benefit humans (e.g., decreased allergen production). An improved yield of a plant relates to an increase in the yield of a product (e.g., as measured by plant biomass, grain, seed or fruit yield, protein content, carbohydrate or oil content or leaf area) of the plant by a measurable amount over the yield of the same product of the plant produced under the same conditions, but without the application of the instant compositions or compared with application of conventional plant-modifying agents. For example, yield can be increased by at least about 0.5%, about 1%, about 2%, about 3%, about 4%, about 5%, about 10%, about 20%, about 30%, about 40%, about 50%, about 60%, about 70%, about 80%, about 90%, about 100%, or more than 100%. In some instances, the method is effective to increase yield by about 2×-fold, 5×-fold, 10×-fold, 25×-fold, 50×-fold, 75×-fold, 100×-fold, or more than 100×-fold relative to an untreated plant. Yield can be expressed in terms of an amount by weight or volume of the plant or a product of the plant on some basis. The basis can be expressed in terms of time, growing area, weight of plants produced, or amount of a raw material used. For example, such methods may increase the yield of plant tissues including, but not limited to: seeds, fruits, kernels, bolls, tubers, roots, and leaves.

[0830] An increase in the fitness of a plant as a consequence of delivery of a Gene Writer system can also be measured by other means, such as an increase or improvement of the vigor rating, the stand (the number of plants per unit of area), plant height, stalk circumference, stalk length, leaf number, leaf size, plant canopy, visual appearance (such as greener leaf color), root rating, emergence, protein content, increased tillering, bigger leaves, more leaves, less dead basal leaves, stronger tillers, less fertilizer needed, less seeds needed, more productive tillers, earlier flowering, early grain or seed maturity, less plant verse (lodging), increased shoot growth, earlier germination, or any combination of these factors, by a measurable or noticeable amount over the same factor of the plant produced under the same conditions, but without the administration of the instant compositions or with application of conventional plant-modifying agents (e.g., plant-modifying agents delivered without PMPs).

[0831] Accordingly, provided herein is a method of modifying a plant, the method including delivering to the plant an effective amount of any of the Gene Writer systems provided herein, wherein the method modifies the plant and thereby introduces or increases a beneficial trait in the plant (e.g., by about 1%, 2%, 5%, 10%, 20%, 30%, 40%, 50%, 60%, 70%, 80%, 90%, 100%, or more than 100%) relative to an untreated plant. In particular, the method may increase the fitness of the plant (e.g., by about 1%, 2%, 5%, 10%, 20%, 30%, 40%, 50%, 60%, 70%, 80%, 90%, 100%, or more than 100%) relative to an untreated plant.

[0832] In some instances, the increase in plant fitness is an increase (e.g., by about 1%, 2%, 5%, 10%, 20%, 30%, 40%, 50%, 60%, 70%, 80%, 90%, 100%, or more than 100%) in disease resistance, drought tolerance, heat tolerance, cold tolerance, salt tolerance, metal tolerance, herbicide tolerance, chemical tolerance, water use efficiency, nitrogen utilization, resistance to nitrogen stress, nitrogen fixation, pest resistance, herbivore resistance, pathogen resistance, yield, yield under water-limited conditions, vigor, growth, photosynthetic capability, nutrition, protein content, carbohydrate content, oil content, biomass, shoot length, root length, root architecture, seed weight, or amount of harvestable produce.

[0833] In some instances, the increase in fitness is an increase (e.g., by about 1%, 2%, 5%, 10%, 20%, 30%, 40%, 50%, 60%, 70%, 80%, 90%, 100%, or more than 100%) in development, growth, yield, resistance to abiotic stressors, or resistance to biotic stressors. An abiotic stress refers to an environmental stress condition that a plant or a plant part is subjected to that includes, e.g., drought stress, salt stress, heat stress, cold stress, and low nutrient stress. A biotic stress refers to an environmental stress condition that a plant or plant part is subjected to that includes, e.g. nematode stress, insect herbivory stress, fungal pathogen stress, bacterial pathogen stress, or viral pathogen stress. The stress may be temporary, e.g. several hours, several days, several months, or permanent, e.g. for the life of the plant.

[0834] In some instances, the increase in plant fitness is an increase (e.g., by about 1%, 2%, 5%, 10%, 20%, 30%, 40%, 50%, 60%, 70%, 80%, 90%, 100%, or more than 100%) in quality of products harvested from the plant. For example, the increase in plant fitness may be an improvement in commercially favorable features (e.g., taste or appearance) of a product harvested from the plant. In other instances, the increase in plant fitness is an increase in shelf-life of a product harvested from the plant (e.g., by about 1%, 2%, 5%, 10%, 20%, 30%, 40%, 50%, 60%, 70%, 80%, 90%, 100%, or more than 100%).

[0835] Alternatively, the increase in fitness may be an alteration of a trait that is beneficial to human or animal health, such as a reduction in allergen production. For example, the increase in fitness may be a decrease (e.g., by about 1%, 2%, 5%, 10%, 20%, 30%, 40%, 50%, 60%, 70%, 80%, 90%, 100%, or more than 100%) in production of an allergen (e.g., pollen) that stimulates an immune response in an animal (e.g., human).

[0836] The modification of the plant (e.g., increase in fitness) may arise from modification of one or more plant parts. For example, the plant can be modified by contacting leaf, seed, pollen, root, fruit, shoot, flower, cells, protoplasts, or tissue (e.g., meristematic tissue) of the plant. As such, in another aspect, provided herein is a method of increasing the fitness of a plant, the method including contacting pollen of the plant with an effective amount of any of the plant-modifying compositions herein, wherein the method increases the fitness of the plant (e.g., by about 1%, 2%, 5%, 10%, 20%, 30%, 40%, 50%, 60%, 70%, 80%, 90%, 100%, or more than 100%) relative to an untreated plant.

[0837] In yet another aspect, provided herein is a method of increasing the fitness of a plant, the method including contacting a seed of the plant with an effective amount of any of the Gene Writer systems disclosed herein, wherein the method increases the fitness of the plant (e.g., by about 1%, 2%, 5%, 10%, 20%, 30%, 40%, 50%, 60%, 70%, 80%, 90%, 100%, or more than 100%) relative to an untreated plant.

[0838] In another aspect, provided herein is a method including contacting a protoplast of the plant with an effective amount of any of the Gene Writer systems described herein, wherein the method increases the fitness of the plant (e.g., by about 1%, 2%, 5%, 10%, 20%, 30%, 40%, 50%, 60%, 70%, 80%, 90%, 100%, or more than 100%) relative to an untreated plant.

[0839] In a further aspect, provided herein is a method of increasing the fitness of a plant, the method including contacting a plant cell of the plant with an effective amount of any of the Gene Writer system described herein, wherein the method increases the fitness of the plant (e.g., by about 1%, 2%, 5%, 10%, 20%, 30%, 40%, 50%, 60%, 70%, 80%, 90%, 100%, or more than 100%) relative to an untreated plant.

[0840] In another aspect, provided herein is a method of increasing the fitness of a plant, the method including contacting meristematic tissue of the plant with an effective amount of any of the plant-modifying compositions herein, wherein the method increases the fitness of the plant (e.g., by about 1%, 2%, 5%, 10%, 20%, 30%, 40%, 50%, 60%, 70%, 80%, 90%, 100%, or more than 100%) relative to an untreated plant.

[0841] In another aspect, provided herein is a method of increasing the fitness of a plant, the method including contacting an embryo of the plant with an effective amount of any of the plant-modifying compositions herein, wherein the method increases the fitness of the plant (e.g., by about 1%, 2%, 5%, 10%, 20%, 30%, 40%, 50%, 60%, 70%, 80%, 90%, 100%, or more than 100%) relative to an untreated plant.

### B. Application Methods

[0842] A plant described herein can be exposed to any of the Gene Writer system compositions described herein in any suitable manner that permits delivering or administering the composition to the plant. The Gene Writer system may be delivered either alone or in combination with other active (e.g., fertilizing agents) or inactive substances and may be applied by, for example, spraying, injection (e.g., microinjection), through plants, pouring, dipping, in the form of concentrated liquids, gels, solutions, suspensions, sprays, powders, pellets, briquettes, bricks and the like, formulated to deliver an effective concentration of the plant-modifying composition. Amounts and locations for application of the compositions described herein are generally determined by the habitat of the plant, the lifecycle stage at which the plant can be targeted by the plant-modifying composition, the site where the application is to be made, and the physical and functional characteristics of the plant-modifying composition.

[0843] In some instances, the composition is sprayed directly onto a plant, e.g., crops, by e.g., backpack spraying, aerial spraying, crop spraying/dusting etc. In instances where the Gene Writer system is delivered to a plant, the plant receiving the Gene Writer system may be at any stage of plant growth. For example, formulated plant-modifying compositions can be applied as a seed-coating or root treatment in early stages of plant growth or as a total plant treatment at later stages of the crop cycle. In some instances, the plant-modifying composition may be applied as a topical agent to a plant.

[0844] Further, the Gene Writer system may be applied (e.g., in the soil in which a plant grows, or in the water that is used to water the plant) as a systemic agent that is absorbed and distributed through the tissues of a plant. In some instances, plants or food organisms may be genetically transformed to express the Gene Writer system.

[0845] Delayed or continuous release can also be accomplished by coating the Gene Writer system or a composition with the plant-modifying composition(s) with a dissolvable or bioerodable coating layer, such as gelatin, which coating dissolves or erodes in the environment of use, to then make the plant-modifying com Gene Writer system position available, or by dispersing the agent in a dissolvable or erodable matrix. Such continuous release and/or dispensing means devices may be advantageously employed to consistently maintain an effective concentration of one or more of the plant-modifying compositions described herein.

[0846] In some instances, the Gene Writer system is delivered to a part of the plant, e.g., a leaf, seed, pollen, root, fruit, shoot, or flower, or a tissue, cell, or protoplast thereof. In some instances, the Gene Writer system is delivered to a cell of the plant. In some instances, the Gene Writer system is delivered to a protoplast of the plant. In some instances, the Gene Writer system is delivered to a tissue of the plant. For example, the composition may be delivered to meristematic tissue of the plant (e.g., apical meristem, lateral meristem, or intercalary meristem). In some instances, the composition is delivered to permanent tissue of the plant (e.g., simple tissues (e.g., parenchyma, collenchyma, or sclerenchyma) or complex permanent tissue (e.g., xylem or phloem)). In some instances, the Gene Writer system is delivered to a plant embryo.

### C. Plants

[0847] A variety of plants can be delivered to or treated with a Gene Writer system described herein. Plants that can be delivered a Gene Writer system (i.e., “treated”) in accordance with the present methods include whole plants and parts thereof, including, but not limited to, shoot vegetative organs/structures (e.g., leaves, stems and tubers), roots, flowers and floral organs/structures (e.g., bracts, sepals, petals, stamens, carpels, anthers and ovules), seed (including embryo, endosperm, cotyledons, and seed coat) and fruit (the mature ovary), plant tissue (e.g., vascular tissue, ground tissue, and the like) and cells (e.g., guard cells, egg cells, and the like), and progeny of same. Plant parts can further refer parts of the plant such as the shoot, root, stem, seeds, stipules, leaves, petals, flowers, ovules, bracts, branches, petioles, internodes, bark, pubescence, tillers, rhizomes, fronds, blades, pollen, stamen, and the like.

[0848] The class of plants that can be treated in a method disclosed herein includes the class of higher and lower plants, including angiosperms (monocotyledonous and dicotyledonous plants), gymnosperms, ferns, horsetails, psilophytes, lycophytes, bryophytes, and algae (e.g., multicellular or unicellular algae). Plants that can be treated in accordance with the present methods further include any vascular plant, for example monocotyledons or dicotyledons or gymnosperms, including, but not limited to alfalfa, apple, Arabidopsis, banana, barley, canola, castor bean, chrysanthemum, clover, cocoa, coffee, cotton, cottonseed, corn, crambe, cranberry, cucumber, dendrobium, dioscorea, eucalyptus, fescue, flax, gladiolus, liliacea, linseed, millet, muskmelon, mustard, oat, oil palm, oilseed rape, papaya, peanut, pineapple, ornamental plants, Phaseolus, potato, rapeseed, rice, rye, ryegrass, safflower, sesame, sorghum, soybean, sugarbeet, sugarcane, sunflower, strawberry, tobacco, tomato, turfgrass, wheat and vegetable crops such as lettuce, celery, broccoli, cauliflower, cucurbits; fruit and nut trees, such as apple, pear, peach, orange, grapefruit, lemon, lime, almond, pecan, walnut, hazel; vines, such as grapes (e.g., a vineyard), kiwi, hops; fruit shrubs and brambles, such as raspberry, blackberry, gooseberry; forest trees, such as ash, pine, fir, maple, oak, chestnut, popular; with alfalfa, canola, castor bean, corn, cotton, crambe, flax, linseed, mustard, oil palm, oilseed rape, peanut, potato, rice, safflower, sesame, soybean, sugarbeet, sunflower, tobacco, tomato, and wheat. Plants that can be treated in accordance with the methods of the present invention include any crop plant, for example, forage crop, oilseed crop, grain crop, fruit crop, vegetable crop, fiber crop, spice crop, nut crop, turf crop, sugar crop, beverage crop, and forest crop. In certain instances, the crop plant that is treated in the method is a soybean plant. In other certain instances, the crop plant is wheat. In certain instances, the crop plant is corn. In certain instances, the crop plant is cotton. In certain instances, the crop plant is alfalfa. In certain instances, the crop plant is sugarbeet. In certain instances, the crop plant is rice. In certain instances, the crop plant is potato. In certain instances, the crop plant is tomato.

[0849] In certain instances, the plant is a crop. Examples of such crop plants include, but are not limited to, monocotyledonous and dicotyledonous plants including, but not limited to, fodder or forage legumes, ornamental plants, food crops, trees, or shrubs selected from Acer spp., Allium spp., Amaranthus spp., Ananas comosus, Apium graveolens, Arachis spp, Asparagus officinalis, Beta vulgaris, Brassica spp. (e.g., Brassica napus, Brassica rapa ssp. (canola, oilseed rape, turnip rape), Camellia sinensis, Canna indica, Cannabis saliva, Capsicum spp., Castanea spp., Cichorium endivia, Citrullus lanatus, Citrus spp., Cocos spp., Coffea spp., Coriandrum sativum, Corylus spp., Crataegus spp., Cucurbita spp., Cucumis spp., Daucus carota, Fagus spp., Ficus carica, Fragaria spp., Ginkgo biloba, Glycine spp. (e.g., Glycine max, Soja hispida or Soja max), Gossypium hirsutum, Helianthus spp. (e.g., Helianthus annuus), Hibiscus spp., Hordeum spp. (e.g., Hordeum vulgare), Ipomoea batatas, Juglans spp., Lactuca sativa, Linum usitatissimum, Litchi chinensis, Lotus spp., Luffa acutangula, Lupinus spp., Lycopersicon spp. (e.g., Lycopersicon esculenturn, Lycopersicon lycopersicum, Lycopersicon pyriforme), Malus spp., Medicago sativa, Mentha spp., Miscanthus sinensis, Morus nigra, Musa spp., Nicotiana spp., Olea spp., Oryza spp. (e.g., Oryza sativa, Oryza latifolia), Panicum miliaceum, Panicum virgatum, Passiflora edulis, Petroselinum crispum, Phaseolus spp., Pinus spp., Pistacia vera, Pisum spp., Poa spp., Populus spp., Prunus spp., Pyrus communis, Quercus spp., Raphanus sativus, Rheum rhabarbarum, Ribes spp., Ricinus communis, Rubus spp., Saccharum spp., Salix sp., Sambucus spp., Secale cereale, Sesamum spp., Sinapis spp., Solanum spp. (e.g., Solanum tuberosum, Solanum integrifolium or Solanum lycopersicum), Sorghum bicolor, Sorghum halepense, Spinacia spp., Tamarindus indica, Theobroma cacao, Trifolium spp., Triticosecale rimpaui, Triticum spp. (e.g., Triticum aestivum, Triticum durum, Triticum turgidum, Triticum hybernum, Triticum macha, Triticum sativum or Triticum vulgare), Vaccinium spp., Vicia spp., Vigna spp., Viola odorata, Vitis spp., and Zea mays. In certain embodiments, the crop plant is rice, oilseed rape, canola, soybean, corn (maize), cotton, sugarcane, alfalfa, sorghum, or wheat.

[0850] The plant or plant part for use in the present invention include plants of any stage of plant development. In certain instances, the delivery can occur during the stages of germination, seedling growth, vegetative growth, and reproductive growth. In certain instances, delivery to the plant occurs during vegetative and reproductive growth stages. In some instances, the composition is delivered to pollen of the plant. In some instances, the composition is delivered to a seed of the plant. In some instances, the composition is delivered to a protoplast of the plant. In some instances, the composition is delivered to a tissue of the plant. For example, the composition may be delivered to meristematic tissue of the plant (e.g., apical meristem, lateral meristem, or intercalary meristem). In some instances, the composition is delivered to permanent tissue of the plant (e.g., simple tissues (e.g., parenchyma, collenchyma, or sclerenchyma) or complex permanent tissue (e.g., xylem or phloem)). In some instances, the composition is delivered to a plant embryo. In some instances, the composition is delivered to a plant cell. The stages of vegetative and reproductive growth are also referred to herein as “adult” or “mature” plants.

[0851] In instances where the Gene Writer system is delivered to a plant part, the plant part may be modified by the plant-modifying agent. Alternatively, the Gene Writer system may be distributed to other parts of the plant (e.g., by the plant's circulatory system) that are subsequently modified by the plant-modifying agent.

[0852] All publications, patent applications, patents, and other publications and references (e.g., sequence database reference numbers) cited herein are incorporated by reference in their entirety. For example, all GenBank, Unigene, and Entrez sequences referred to herein, e.g., in any Table herein, are incorporated by reference. Unless otherwise specified, the sequences specified herein (e.g., by gene name in RepBase or by accession number), including in any Table herein, refer to the database entries current as of Mar. 4, 2020. When one gene or protein references a plurality of sequence accession numbers, all of the sequence variants are encompassed.

### EXAMPLES

[0853] The invention is further illustrated by the following examples. The examples are provided for illustrative purposes only and are not to be construed as limiting the scope or content of the invention in any way.

### Example 1: Formulation of Lipid Nanoparticles Encapsulating Firefly Luciferase mRNA

[0854] In this example, a reporter mRNA encoding firefly luciferase was formulated into lipid nanoparticles comprising different ionizable lipids. Lipid nanoparticle (LNP) components (ionizable lipid, helper lipid, sterol, PEG) were dissolved in 100% ethanol with the lipid component. These were then prepared at molar ratios of 50:10:38.5:1.5 using ionizable lipid LIPIDV004 or LIPIDV005 (Table A1), DSPC, cholesterol, and DMG-PEG 2000, respectively. Firefly Luciferase mRNA-LNPs containing the ionizable lipid LIPIDV003 (Table A1) were prepared at a molar ratio of 45:9:44:2 using LIPIDV003, DSPC, cholesterol, and DMG-PEG 2000, respectively. Firefly luciferase mRNA used in these formulations was produced by in vitro transcription and encoded the Firefly Luciferase protein, further comprising a 5′ cap, 5′ and 3′ UTRs, and a polyA tail. The mRNA was synthesized under standard conditions for T7 RNA polymerase in vitro transcription with co-transcriptional capping, but with the nucleotide triphosphate UTP 100% substituted with N1-methyl-pseudouridine triphosphate in the reaction. Purified mRNA was dissolved in 25 mM sodium citrate, pH 4 to a concentration of 0.1 mg/mL.

[0855] Firefly Luciferase mRNA was formulated into LNPs with a lipid amine to RNA phosphate (N:P) molar ratio of 6. The LNPs were formed by microfluidic mixing of the lipid and RNA solutions using a Precision Nanosystems NanoAssemblr™ Benchtop Instrument, using the manufacturer's recommended settings. A 3:1 ratio of aqueous to organic solvent was maintained during mixing using differential flow rates. After mixing, the LNPs were collected and dialyzed in 15 mM Tris, 5% sucrose buffer at 4° C. overnight. The Firefly Luciferase mRNA-LNP formulation was concentrated by centrifugation with Amicon 10 kDa centrifugal filters (Millipore). The resulting mixture was then filtered using a 0.2 m sterile filter. The final LNP was stored at −80° C. until further use.

TABLE A1
Ionizable Lipids used in Example 1 ( Formula (ix), (vii), and (iii))

| | | Molecular | |
|---|---|---|---|
| LIPID ID | Chemical Name | Weight | Structure |
| LIPIDV003 | (9Z,12Z)-3- ((4,4- bis(octyloxy) butanoyl) oxy)-2- ((((3- (diethylamino) propoxy) carbonyl) oxy)methyl) propyl octadeca- 9, 12-dienoate | 852.29 | [chemical structure] |
| LIPIDV004 | Heptadecan- 9-yl 8-((2- hydroxyethyl) (8- (nonyloxy)-8- oxooctyl) amino) octanoate | 710.18 | [chemical structure] |
| LIPIDV005 | | 919.56 | [chemical structure] |

[0856] Prepared LNPs were analyzed for size, uniformity, and % RNA encapsulation. The size and uniformity measurements were performed by dynamic light scattering using a Malvern Zetasizer DLS instrument (Malvern Panalytical). LNPs were diluted in PBS prior to being measured by DLS to determine the average particle size (nanometers, nm) and polydispersity index (pdi). The particle sizes of the Firefly Luciferase mRNA-LNPs are shown in Table A2.

TABLE A2
LNP particle size and uniformity

| LNP ID | Ionizable Lipid | Particle Size (nm) | pdi |
|---|---|---|---|
| LNPV019-002 | LIPIDV005 | 77 | 0.04 |
| LNPV006-006 | LIPIDV004 | 71 | 0.08 |
| LNPV011-003 | LIPIDV003 | 87 | 0.08 |

[0857] The percent encapsulation of luciferase mRNA was measured by the fluorescence-based RNA quantification assay Ribogreen (ThermoFisher Scientific). LNP samples were diluted in 1×TE buffer and mixed with the Ribogreen reagent per manufacturer's recommendations and measured on a i3 SpectraMax spectrophotomer (Molecular Devices) using 644 nm excitation and 673 nm emission wavelengths. To determine the percent encapsulation, LNPs were measured using the Ribogreen assay with intact LNPs and disrupted LNPs, where the particles were incubated with 1×TE buffer containing 0.2% (w/w) Triton-X100 to disrupt particles to allow encapsulated RNA to interact with the Ribogreen reagent. The samples were again measured on the i3 SpectraMax spectrophotometer to determine the total amount of RNA present. Total RNA was subtracted from the amount of RNA detected when the LNPs were intact to determine the fraction encapsulated. Values were multiplied by 100 to determine the percent encapsulation. The Firefly Luciferase mRNA-LNPs that were measured by Ribogreen and the percent RNA encapsulation is reported in Table A3.

TABLE A3
RNA encapsulation after LNP formulation

| LNP ID | Ionizable Lipid | % mRNA encapsulation |
|---|---|---|
| LNPV019-002 | LIPIDV005 | 98 |
| LNPV006-006 | LIPIDV004 | 92 |
| LNPV011-003 | LIPIDV003 | 97 |

### Example 2: In Vitro Activity Testing of mRNA-LNPs in Primary Hepatocytes

[0858] In this example, LNPs comprising the luciferase reporter mRNA were used to deliver the RNA cargo into cells in culture. Primary mouse or primary human hepatocytes were thawed and plated in collagen-coated 96-well tissue culture plates at a density of 30,000 or 50,000 cells per well, respectively. The cells were plated in 1× William's Media E with no phenol red and incubated at 37° C. with 5% CO₂. After 4 hours, the medium was replaced with maintenance medium (lx William's Media E with no phenol containing Hepatocyte Maintenance Supplement Pack (ThermoFisher Scientific)) and cells were grown overnight at 37° C. with 5% CO₂. Firefly Luciferase mRNA-LNPs were thawed at 4° C. and gently mixed. The LNPs were diluted to the appropriate concentration in maintenance media containing 7.5% fetal bovine serum. The LNPs were incubated at 37° C. for 5 minutes prior to being added to the plated primary hepatocytes. To assess delivery of RNA cargo to cells, LNPs were incubated with primary hepatocytes for 24 hours and cells were then harvested and lysed for a Luciferase activity assay. Briefly, medium was aspirated from each well followed by a wash with 1×PBS. The PBS was aspirated from each well and 200 μL passive lysis buffer (PLB) (Promega) was added back to each well and then placed on a plate shaker for 10 minutes. The lysed cells in PLB were frozen and stored at −80° C. until luciferase activity assay was performed.

[0859] To perform the luciferase activity assay, cellular lysates in passive lysis buffer were thawed, transferred to a round bottom 96-well microtiter plate and spun down at 15,000 g at 4° C. for 3 min to remove cellular debris. The concentration of protein was measured for each sample using the Pierce™ BCA Protein Assay Kit (ThermoFisher Scientific) according to the manufacturer's instructions. Protein concentrations were used to normalize for cell numbers and determine appropriate dilutions of lysates for the luciferase assay. The luciferase activity assay was performed in white-walled 96-well microtiter plates using the luciferase assay reagent (Promega) according to manufacturer's instructions and luminescence was measured using an i3X SpectraMax plate reader (Molecular Devices). The results of the dose-response of Firefly luciferase activity mediated by the Firefly mRNA-LNPs are shown in FIG. 7 and indicate successful LNP-mediated delivery of RNA into primary cells in culture. As shown in FIG. 7A, LNPs formulated as according to Example 1 were analyzed for delivery of cargo to primary human (A) and mouse (B) hepatocytes, as according to Example 2. The luciferase assay revealed dose-responsive luciferase activity from cell lysates, indicating successful delivery of RNA to the cells and expression of Firefly luciferase from the mRNA cargo.

### Example 3: LNP-Mediated Delivery of RNA to the Mouse Liver

[0860] To measure the effectiveness of LNP-mediated delivery of firefly luciferase containing particles to the liver, LNPs were formulated and characterized as described in Example 1 and tested in vitro prior (Example 2) to administration to mice. C57BL/6 male mice (Charles River Labs) at approximately 8 weeks of age were dosed with LNPs via intravenous (i.v.) route at 1 mg/kg. Vehicle control animals were dosed i.v. with 300 μL phosphate buffered saline. Mice were injected via intraperitoneal route with dexamethasone at 5 mg/kg 30 minutes prior to injection of LNPs. Tissues were collected at necropsy at or 6, 24, 48 hours after LNP administration with a group size of 5 mice per time point. Liver and other tissue samples were collected, snap-frozen in liquid nitrogen, and stored at −80° C. until analysis. Frozen liver samples were pulverized on dry ice and transferred to homogenization tubes containing lysing matrix D beads (MP Biomedical). Ice-cold 1× luciferase cell culture lysis reagent (CCLR) (Promega) was added to each tube and the samples were homogenized in a Fast Prep-24 5G Homogenizer (MP Biomedical) at 6 m/s for 40 seconds. The samples were transferred to a clean microcentrifuge tube and clarified by centrifugation. Prior to luciferase activity assay, the protein concentration of liver homogenates was determined for each sample using the Pierce™ BCA Protein Assay Kit (ThermoFisher Scientific) according to the manufacturer's instructions. Luciferase activity was measured with 200 pg (total protein) of liver homogenate using the luciferase assay reagent (Promega) according to manufacturer's instructions using an i3X SpectraMax plate reader (Molecular Devices). Liver samples revealed successful delivery of mRNA by all lipid formulations, with reporter activity following the ranking LIPIDV005>LIPIDV004>LIPIDV003 (FIG. 8). As shown in FIG. 8, Firefly luciferase mRNA-containing LNPs were formulated and delivered to mice by iv, and liver samples were harvested and assayed for luciferase activity at 6, 24, and 48 hours post administration. Reporter activity by the various formulations followed the ranking LIPIDV005>LIPIDV004>LIPIDV003. RNA expression was transient and enzyme levels returned near vehicle background by 48 hours. Post-administration. This assay validated the use of these ionizable lipids and their respective formulations for RNA systems for delivery to the liver.

[0861] Without wishing to be limited by example, the lipids and formulations described in this example are support the efficacy for the in vivo delivery of other RNA molecules beyond a reporter mRNA. All-RNA Gene Writing systems can be delivered by the formulations described herein. For example, all-RNA systems employing a Gene Writer polypeptide mRNA, Template RNA, and an optional second-nick gRNA are described for editing the genome in vitro by nucleofection, by using modified nucleotides, by lipofection), and editing cells, e.g., primary T cells. As described in this application, these all-RNA systems have many unique advantages in cellular immunogenicity and toxicity, which is of importance when dealing with more sensitive primary cells, especially immune cells, e.g., T cells, as opposed to immortalized cell culture cell lines. Further, it is contemplated that these all RNA systems could be targeted to alternate tissues and cell types using novel lipid delivery systems as referenced herein, e.g., for delivery to the liver, the lungs, muscle, immune cells, and others, given the function of Gene Writing systems has been validated in multiple cell types in vitro here, and the function of other RNA systems delivered with targeted LNPs is known in the art. The in vivo delivery of Gene Writing systems has potential for great impact in many therapeutic areas, e.g., correcting pathogenic mutations), instilling protective variants, and enhancing cells endogenous to the body, e.g., T cells. Given an appropriate formulation, all-RNA Gene Writing is conceived to enable the manufacture of cell-based therapies in situ in the patient.

### Example 4: Plasmid Delivery of, e.g., MusD

[0862] This example demonstrates LTR retrotransposon-mediated integration of a genetic therapeutic payload into the genome of human cells. In order to assess integration, the stability of therapeutic protein expression is measured over time as cells divide. Protein expression stability is conceived to occur as a result of the integration of the therapeutic protein gene expression cassette into the human genome.

[0863] To assess expression stability, HEK293T and HepG2 cells are transfected with (1) a template plasmid and an active driver plasmid, (2) a template plasmid and an inactive driver plasmid, or (3) a template plasmid alone. The template plasmid comprises a promoter that mediates transcription of an RNA template which comprises a 5′ LTR, a psi/RRE sequence, a promoter, a CD19-targeted chimeric antigen receptor (CAR) coding sequence, and a 3′ LTR. The driver plasmid comprises a promoter that mediates transcription of a driver RNA that codes for LTR retrotransposon gag proteins (Matrix, Nucleocapsid, and Capsid) and pol proteins (Reverse transcriptase, integrase, and protease). In this example, the 5′ and 3′ LTR of the template RNA, and the gag and pol proteins of the driver RNA are derived from the MusD LTR retrotransposon. The inactive driver plasmid has an inactivating mutation in the reverse transcriptase protein coding sequence, which prevents the reverse transcriptase from reverse transcribing the template RNA.

[0864] Beginning three days after transfection, CAR expression is measured via flow cytometry after staining with CD19 antigen fused to FC, with a secondary stain with a fluorophore conjugated to an anti-FC domain (eg as described in doi: 10.3389/fimmu.2020.01770). CAR expression is measured on days 7, 10, 14, 21, 28, and 60 post-transduction. The integration frequency is approximated by determining stable expression of the CAR at day 21, e.g., the fraction of cells that are CAR+ by flow cytometry at day 21. Stability profiles of CAR expression for each system are determined by assaying the frequency (e.g., percent CAR+) and/or the expression level (e.g., median fluorescence signal) of cells at days 28 and 60 post-transduction, as measured by flow cytometry for CAR fluorescence.

[0865] In some embodiments, cells treated with a template and active driver plasmid (1) show a decrease in the loss of frequency of CAR expression (e.g., percent CAR+) and/or loss of expression level (e.g., median fluorescence signal) at day 28 and/or day 60 post-transduction, e.g., at least 1.1, 1.2, 1.3, 1.4, 1.5, 1.6, 1.7, 1.8, 1.9, 2.0, 2.5, 3, 4, 5, 6, 7, 8, 9, or at least 10-fold lower than cells treated with (2) and/or (3). In some embodiments, cells treated with a template and active driver plasmid (1) show a higher frequency of expression (e.g., percent CAR+) and/or a higher level of expression (e.g., median fluorescence signal) at day 28 and/or day 60 post-transduction, e.g., at least 1.1, 1.2, 1.3, 1.4, 1.5, 1.6, 1.7, 1.8, 1.9, 2.0, 2.5, 3, 4, 5, 6, 7, 8, 9, or at least 10-fold higher than cells treated with (2) and/or (3).

### Example 5: All-RNA Delivery of, e.g., MusD

[0866] This example demonstrates LTR retrotransposon-mediated integration of a genetic payload into the genome of human cells via RNA delivery. In order to assess integration, the stability of therapeutic protein expression is measured over time as cells divide. Protein expression stability is conceived to occur as a result of the integration of a gene expression cassette into the human genome.

[0867] To assess expression stability, HEK293T and HepG2 cells are transfected with (1) a template RNA and an active driver mRNA, (2) a template RNA and an inactive driver mRNA, or (3) a template RNA alone. The template RNA comprises a 5′ LTR, a psi/RRE sequence, a promoter, a GFP coding sequence, and a 3′ LTR. The driver mRNA codes for LTR retrotransposon gag proteins (Matrix, Nucleocapsid, and Capsid) and pol proteins (Reverse transcriptase, integrase, and protease). In this example, the 5′ and 3′ LTR of the template RNA, and the gag and pol proteins of the driver RNA are derived from the MusD LTR retrotransposon. The inactive driver mRNA has an inactivating mutation in the reverse transcriptase protein coding sequence, which prevents the reverse transcriptase from reverse transcribing the template RNA.

[0868] Beginning three days after transfection, GFP expression is measured via flow cytometry. GFP expression is measured on days 7, 10, 14, 21, 28, and 60 post-transduction. The integration frequency is approximated by determining stable expression of the GFP at day 21, e.g., the fraction of cells that are GFP+ by flow cytometry at day 21. Stability profiles of GFP expression for each system are determined by assaying the frequency (e.g., percent GFP+) and/or the expression level (e.g., median GFP signal) of cells at days 28 and 60 post-transduction, as measured by flow cytometry for GFP fluorescence.

[0869] In some embodiments, cells treated with a template RNA and active driver RNA (1) show a decrease in the loss of frequency of GFP expression (e.g., percent GFP+) and/or loss of expression level (e.g., median fluorescence signal) at day 28 and/or day 60 post-transduction, e.g., at least 1.1, 1.2, 1.3, 1.4, 1.5, 1.6, 1.7, 1.8, 1.9, 2.0, 2.5, 3, 4, 5, 6, 7, 8, 9, or at least 10-fold lower than cells treated with (2) and/or (3). In some embodiments, cells treated with a template and active driver plasmid (1) show a higher frequency of expression (e.g., percent GFP+) and/or a higher level of expression (e.g., median fluorescence signal) at day 28 and/or day 60 post-transduction, e.g., at least 1.1, 1.2, 1.3, 1.4, 1.5, 1.6, 1.7, 1.8, 1.9, 2.0, 2.5, 3, 4, 5, 6, 7, 8, 9, or at least 10-fold higher than cells treated with (2) and/or (3).

### Example 6: RNA Delivery of Integration-Deficient LTR

[0870] This example demonstrates LTR retrotransposon-mediated establishment of a genetic payload episome in human cells via RNA delivery. In order to assess integration, the stability of therapeutic protein expression is measured over time after RNA delivery. Protein expression stability is conceived to occur as a result of the formation of a DNA episome in the nucleus.

[0871] To assess expression stability, unstimulated non-dividing T cells are transfected with (1) a template RNA and an active driver mRNA, (2) a template RNA and an inactive driver mRNA, or (3) a template RNA alone. The template RNA comprises a 5′ LTR, a psi/RRE sequence, a promoter, a GFP coding sequence, and a 3′ LTR. The driver mRNA codes for LTR retrotransposon gag proteins (Matrix, Nucleocapsid, and Capsid) and pol proteins (Reverse transcriptase, integrase, and protease), wherein the integrase protein has a mutation that inactivates integrase functionality (discussed elsewhere herein), resulting in the template RNA being reverse transcribed but not integrated into the genome. In this example, the 5′ and 3′ LTR of the template RNA, and the gag and pol proteins of the driver RNA are derived from the MusD LTR retrotransposon. The inactive driver mRNA further comprises an inactivating mutation in the reverse transcriptase protein coding sequence, which prevents the reverse transcriptase from reverse transcribing the template RNA.

[0872] Beginning 6 hours after transfection, GFP expression is measured via flow cytometry. GFP expression is measured at 6 hours, 12 hours, 16 hours, 24 hours, 36 hours, 48 hours, and then on days 3 and day 7 post-transduction. Episomal DNA formation is approximated by determining stable expression of GFP at day 3, e.g., the fraction of cells that are GFP+ by flow cytometry at day 3. Stability profiles of GFP expression for each system are determined by assaying the frequency (e.g., percent GFP+) and/or the expression level (e.g., median GFP signal) of cells 48 hours and 3 days post-transduction, as measured by flow cytometry for GFP fluorescence.

[0873] In some embodiments, cells treated with a template RNA and active driver RNA (1) show a decrease in the loss of frequency of GFP expression (e.g., percent GFP+) and/or loss of expression level (e.g., median fluorescence signal) at day 48 and/or day 3 and 7 post-transduction, e.g., at least 1.1, 1.2, 1.3, 1.4, 1.5, 1.6, 1.7, 1.8, 1.9, 2.0, 2.5, 3, 4, 5, 6, 7, 8, 9, or at least 10-fold lower than cells treated with (2) and/or (3). In some embodiments, cells treated with a template and active driver plasmid (1) show a higher frequency of expression (e.g., percent GFP+) and/or a higher level of expression (e.g., median fluorescence signal) at 48 hours and/or day 3 and 7 post-transduction, e.g., at least 1.1, 1.2, 1.3, 1.4, 1.5, 1.6, 1.7, 1.8, 1.9, 2.0, 2.5, 3, 4, 5, 6, 7, 8, 9, or at least 10-fold higher than cells treated with (2) and/or (3).

[0874] Subsequently, the T cells that were transfected with template and active driver RNA are stimulated to divide with T cell activation reagents known in the art. GFP expression is further measured 1, 3, and 7 days post T cell stimulation. The percent of GFP positive cells and median GFP expression decreases at day 3 and 7 relative to day 1. This demonstrates that the episomal DNA is not integrated into the genome.

### Example 7: Plasmid Delivery of LTR Retrotransposons in Trans

[0875] This example demonstrates LTR retrotransposon-mediated integration of a genetic payload into the genome of human cells in a trans configuration. In order to assess integration, the stability of therapeutic protein expression was measured over a period of time as cells divide. Protein expression stability was conceived to occur as a result of the integration of the gene expression cassette into the human genome.

[0876] To assess expression stability, HEK293T cells were transfected with (1) a template plasmid and an active driver plasmid, (2) a template plasmid and an inactive driver plasmid, or (3) a template plasmid alone. The template plasmid comprised a promoter that mediates transcription of an RNA template which comprised a promoter, an R sequence, a U5 sequence, a primer binding site (PBS) sequence, a heterologous object sequence, polypurine tract (PPT), a 3′ LTR and an SV40 polyA sequence. The 3′LTR comprised a U3, R and U5 sequence. The driver plasmid comprised a promoter that mediates transcription of a driver RNA that codes for LTR retrotransposon gag proteins (Matrix, Nucleocapsid, and Capsid), protease (pro) proteins, and pol proteins (Reverse transcriptase and integrase). In this example, the 5′ R/U5 and 3′ LTR of the template RNA, and the gag, pro and pol proteins of the driver RNA were derived from the MusD6 LTR retrotransposon. In some instances, the 5′ R/U5 and 3′ LTR of the template RNA was derived from the ETnII-B3 retrotransposon. The inactive driver plasmid had an inactivating deletion of the reverse transcriptase protein coding sequence, which prevents the reverse transcriptase from reverse transcribing the template RNA.

[0877] A more detailed description of exemplary driver and template configurations are provided below. Sequences used in the exemplary driver and template constructs are listed in Tables S1-S5.

TABLE S1
Common LTR construct elements

| | | SEQ | | | SEQ |
|---|---|---|---|---|---|
| | | ID | | | ID |
| name | nucleic_acid_sequence | NO: | length | protein_sequence | NO: |
| CMV promoter | CGTTACATAACTTACGGTAAATGGCCCGCCTGGCTGACCGCC | 284 | 525 | N/A | |
| (full length for | CAACGACCCCCGCCCATTGACGTCAATAATGACGTATGTTCC | | | | |
| CMV MusD/ETnII | CATAGTAACGCCAATAGGGACTTTCCATTGACGTCAATGGGT | | | | |
| v1, MusD/ETnII | GGAGTATTTACGGTAAACTGCCCACTTGGCAGTACATCAAGT | | | | |
| v2 and IAP v1 | GTATCATATGCCAAGTACGCCCCCTATTGACGTCAATGACGG | | | | |
| designs) | TAAATGGCCCGCCTGGCATTATGCCCAGTACATGACCTTATG | | | | |
| | GGACTTTCCTACTTGGCAGTACATCTACGTATTAGTCATCGCT | | | | |
| | ATTACCATGGTGATGCGGTTTTGGCAGTACATCAATGGGCGT | | | | |
| | GGATAGCGGTTTGACTCACGGGGATTTCCAAGTCTCCACCCC | | | | |
| | ATTGACGTCAATGGGAGTTTGTTTTGGCACCAAAATCAACGG | | | | |
| | GACTTTCCAAAATGTCGTAACAACTCCGCCCCATTGACGCAA | | | | |
| | ATGGGCGGTAGGCGTGTACGGTGGGAGGTCTATATAAGCAG | | | | |
| | AGCTCGTTTAGTGAACCGTCA | | | | |
| CMV promoter | CGTTACATAACTTACGGTAAATGGCCCGCCTGGCTGACCGCC | 285 | 508 | N/A | |
| (3′ truncated | CAACGACCCCCGCCCATTGACGTCAATAATGACGTATGTTCC | | | | |
| for | CATAGTAACGCCAATAGGGACTTTCCATTGACGTCAATGGGT | | | | |
| CMV MusD/ETnII | GGAGTATTTACGGTAAACTGCCCACTTGGCAGTACATCAAGT | | | | |
| v3 and IAP v2 | GTATCATATGCCAAGTACGCCCCCTATTGACGTCAATGACGG | | | | |
| designs) | TAAATGGCCCGCCTGGCATTATGCCCAGTACATGACCTTATG | | | | |
| | GGACTTTCCTACTTGGCAGTACATCTACGTATTAGTCATCGCT | | | | |
| | ATTACCATGGTGATGCGGTTTTGGCAGTACATCAATGGGCGT | | | | |
| | GGATAGCGGTTTGACTCACGGGGATTTCCAAGTCTCCACCCC | | | | |
| | ATTGACGTCAATGGGAGTTTGTTTTGGCACCAAAATCAACGG | | | | |
| | GACTTTCCAAAATGTCGTAACAACTCCGCCCCATTGACGCAA | | | | |
| | ATGGGCGGTAGGCGTGTACGGTGGGAGGTCTATATAAGCAG | | | | |
| | AGCT | | | | |
| SV40 polyA | GATCCAGACATGATAAGATACATTGATGAGTTTGGACAAACC | 286 | 135 | N /A | |
| | ACAACTAGAATGCAGTGAAAAAAATGCTTTATTTGTGAAATT | | | | |
| | TGTGATGCTATTGCTTTATTTGTAACCATTATAAGCTGCAATA | | | | |
| | AACAAGTT | | | | |
| EF1 alpha | GGGCAGAGCGCACATCGCCCACAGTCCCCGAGAAGTTGGGG | 287 | 212 | N/A | |
| promoter (used | GGAGGGGTCGGCAATTGATCCGGTGCCTAGAGAAGGTGGC | | | | |
| in heterologous | GCGGGGTAAACTGGGAAAGTGATGTCGTGTACTGGCTCCGC | | | | |
| object sequence) | CTTTTTCCCGAGGGTGGGGGAGAACCGTATATAAGTGCAGT | | | | |
| | AGTCGCCGTGAACGTTCTTTTTCGCAACGGGTTTGCCGCCAG | | | | |
| | AACACAG | | | | |
| Kozak sequence | GACCCAAGCTTGGCATTCCGGTACTGTTGGTAAAGCCACC | 288 | 40 | N/A | |
| (used in | | | | | |
| heterologous | | | | | |
| object sequence) | | | | | |
| Kozak sequence | GCCGCCACC | | 9 | N/A | |
| (used in compact | | | | | |
| drivers) | | | | | |
| GFP (used in | ATGGTGAGCAAGGGCGAGGAGCTGTTCACCGGGGTGGTGC | 289 | 720 | MVSKGEELFTGVVPILVELDGDVNGHK | 295 |
| heterologous | CCATCCTGGTCGAGCTGGACGGCGACGTAAACGGCCACAAG | | | FSVSGEGEGDATYGKLTLKFICTTGKLPV | |
| object sequence) | TTCAGCGTGTCCGGCGAGGGCGAGGGCGATGCCACCTACGG | | | PWPTLVTTLTYGVQCFSRYPDHMKQH | |
| | CAAGCTGACCCTGAAGTTCATCTGCACCACCGGCAAGCTGCC | | | DFFKSAMPEGYVQERTIFFKDDGNYKT | |
| | CGTGCCCTGGCCCACCCTCGTGACCACCCTGACCTACGGCGT | | | RAEVKFEGDTLVNRIELKGIDFKEDGNIL | |
| | GCAGTGCTTCAGCCGCTACCCCGACCACATGAAGCAGCACGA | | | GHKLEYNYNSHNVYIMADKQKNGIKV | |
| | CTTCTTCAAGTCCGCCATGCCCGAAGGCTACGTCCAGGAGCG | | | NFKIRHNIEDGSVQLADHYQQNTPIGD | |
| | CACCATCTTCTTCAAGGACGACGGCAACTACAAGACCCGCGC | | | GPVLLPDNHYLSTQSALSKDPNEKRDH | |
| | CGAGGTGAAGTTCGAGGGCGACACCCTGGTGAACCGCATCG | | | MVLLEFVTAAGITLGMDELYK* | |
| | AGCTGAAGGGCATCGACTTCAAGGAGGACGGCAACATCCTG | | | | |
| | GGGCACAAGCTGGAGTACAACTACAACAGCCACAACGTCTAT | | | | |
| | ATCATGGCCGACAAGCAGAAGAACGGCATCAAGGTGAACTT | | | | |
| | CAAGATCCGCCACAACATCGAGGACGGCAGCGTGCAGCTCG | | | | |
| | CCGACCACTACCAGCAGAACACCCCCATCGGCGACGGCCCCG | | | | |
| | TGCTGCTGCCCGACAACCACTACCTGAGCACCCAGTCCGCCC | | | | |
| | TGAGCAAAGACCCCAACGAGAAGCGCGATCACATGGTCCTG | | | | |
| | CTGGAGTTCGTGACCGCCGCCGGGATCACTCTCGGCATGGAC | | | | |
| | GAGCTGTACAAGTAA | | | | |
| SplitGFP (used | ATGGTGAGCAAGGGCGAGGAGCTGTTCACCGGGGTGGTGC | 290 | 853 | N/A | |
| in heterologous | CCATCCTGGTCGAGCTGGACGGCGACGTAAACGGCCACAAG | | | | |
| object sequence) | TTCAGCGTGTCCGGCGAGGGCGAGGGCGATGCCACCTACGG | | | | |
| | CAAGCTGACCCTGAAGTTCATCTGCACCACCGGCAAGCTGCC | | | | |
| | CGTGCCCTGGCCCACCCTCGTGACCACCCTGACCTACGGCGT | | | | |
| | GCAGTGCTTCAGCCGCTACCCCGACCACATGAAGCAGCACGA | | | | |
| | CTTCTTCAAGTCCGCCATGCCCGAAGGCTACGTCCAGGAGCG | | | | |
| | CACCATCTTCTTCAAGGACGACGGCAACTACAAGACCCGCGC | | | | |
| | CGAGGTGAAGTTCGAGGGCGACACCCTGGTGAACCGCATCG | | | | |
| | AGCTGAAGGGCATCGACTTCAAGGAGGACGGCAACATCCTG | | | | |
| | GGGCACAAGCTGGAGTACAACTACAACAGCCACAACGTCTAT | | | | |
| | ATCATGGCCGACAAGCAGAAGAACGGCATCAAGGTGAACTT | | | | |
| | CAAGATCCGCCACAACATCGAGGACGGCAGCGTGCAGCTCG | | | | |
| | CCGACCACTACCAGCAGAACACCCCCATCGGCGACGGCCCCG | | | | |
| | TGCTGCTGCCCGACAACCACTACCTGTGGAGAGAAAGGCAA | | | | |
| | AGTGGATGTCAGTAAGACCAATAGGTGCCTATCAGAAACGC | | | | |
| | AAGAGTCTTCTCTGTCTCGACAAGCCCAGTTTCTATTGGTCTC | | | | |
| | CTTAAACCTGTCTTGTAACCTTGATACTTACCTGAGCACCCAG | | | | |
| | TCCGCCCTGAGCAAAGACCCCAACGAGAAGCGCGATCACAT | | | | |
| | GGTCCTGCTGGAGTTCGTGACCGCCGCCGGGATCACTCTCGG | | | | |
| | CATGGACGAGCTGTACAAGTAA | | | | |
| Intron (used in | GTAAGTATCAAGGTTACAAGACAGGTTTAAGGAGACCAATA | 291 | 133 | N/A | |
| within split GFP | GAAACTGGGCTTGTCGAGACAGAGAAGACTCTTGCGTTTCTG | | | | |
| in the antisense | ATAGGCACCTATTGGTCTTACTGACATCCACTTTGCCTTTCTCT | | | | |
| direction) | CCACAG | | | | |
| TK polyA (used | CGGCAATAAAAAGACAGAATAAAACGCACGGGTGTTGGGTC | 292 | 49 | N/A | |
| in heterologous | GTTTGTTC | | | | |
| object sequence) | | | | | |
| EF1 | GGGCAGAGCGCACATCGCCCACAGTCCCCGAGAAGTTGGGG | 293 | 1168 | N/A | |
| alpha + | GGAGGGGTCGGCAATTGATCCGGTGCCTAGAGAAGGTGGC | | | | |
| SplitGFP + | GCGGGGTAAACTGGGAAAGTGATGTCGTGTACTGGCTCCGC | | | | |
| TKpolyA | CTTTTTCCCGAGGGTGGGGGAGAACCGTATATAAGTGCAGT | | | | |
| (heterologous | AGTCGCCGTGAACGTTCTTTTTCGCAACGGGTTTGCCGCCAG | | | | |
| object sequence) | AACACAGGACCCAAGCTTGGCATTCCGGTACTGTTGGTAAAG | | | | |
| | CCACCATGGTGAGCAAGGGCGAGGAGCTGTTCACCGGGGTG | | | | |
| | GTGCCCATCCTGGTCGAGCTGGACGGCGACGTAAACGGCCA | | | | |
| | CAAGTTCAGCGTGTCCGGCGAGGGCGAGGGCGATGCCACCT | | | | |
| | ACGGCAAGCTGACCCTGAAGTTCATCTGCACCACCGGCAAGC | | | | |
| | TGCCCGTGCCCTGGCCCACCCTCGTGACCACCCTGACCTACG | | | | |
| | GCGTGCAGTGCTTCAGCCGCTACCCCGACCACATGAAGCAGC | | | | |
| | ACGACTTCTTCAAGTCCGCCATGCCCGAAGGCTACGTCCAGG | | | | |
| | AGCGCACCATCTTCTTCAAGGACGACGGCAACTACAAGACCC | | | | |
| | GCGCCGAGGTGAAGTTCGAGGGCGACACCCTGGTGAACCGC | | | | |
| | ATCGAGCTGAAGGGCATCGACTTCAAGGAGGACGGCAACAT | | | | |
| | CCTGGGGCACAAGCTGGAGTACAACTACAACAGCCACAACG | | | | |
| | TCTATATCATGGCCGACAAGCAGAAGAACGGCATCAAGGTG | | | | |
| | AACTTCAAGATCCGCCACAACATCGAGGACGGCAGCGTGCA | | | | |
| | GCTCGCCGACCACTACCAGCAGAACACCCCCATCGGCGACG | | | | |
| | GCCCCGTGCTGCTGCCCGACAACCACTACCTGTGGAGAGAAA | | | | |
| | GGCAAAGTGGATGTCAGTAAGACCAATAGGTGCCTATCAGA | | | | |
| | AACGCAAGAGTCTTCTCTGTCTCGACAAGCCCAGTTTCTATTG | | | | |
| | GTCTCCTTAAACCTGTCTTGTAACCTTGATACTTACCTGAGCA | | | | |
| | CCCAGTCCGCCCTGAGCAAAGACCCCAACGAGAAGCGCGAT | | | | |
| | CACATGGTCCTGCTGGAGTTCGTGACCGCCGCCGGGATCACT | | | | |
| | CTCGGCATGGACGAGCTGTACAAGTAAAGCGGCCGGGGGAT | | | | |
| | CGGCAATAAAAAGACAGAATAAAACGCACGGGTGTTGGGTC | | | | |
| | GTTTGTTC | | | | |
| EF1 | GGGCAGAGCGCACATCGCCCACAGTCCCCGAGAAGTTGGGG | 294 | 1035 | N/A | |
| alpha + GFP + | GGAGGGGTCGGCAATTGATCCGGTGCCTAGAGAAGGTGGC | | | | |
| TKpolyA | GCGGGGTAAACTGGGAAAGTGATGTCGTGTACTGGCTCCGC | | | | |
| (heterologous | CTTTTTCCCGAGGGTGGGGGAGAACCGTATATAAGTGCAGT | | | | |
| object sequence) | AGTCGCCGTGAACGTTCTTTTTCGCAACGGGTTTGCCGCCAG | | | | |
| | AACACAGGACCCAAGCTTGGCATTCCGGTACTGTTGGTAAAG | | | | |
| | CCACCATGGTGAGCAAGGGCGAGGAGCTGTTCACCGGGGTG | | | | |
| | GTGCCCATCCTGGTCGAGCTGGACGGCGACGTAAACGGCCA | | | | |
| | CAAGTTCAGCGTGTCCGGCGAGGGCGAGGGCGATGCCACCT | | | | |
| | ACGGCAAGCTGACCCTGAAGTTCATCTGCACCACCGGCAAGC | | | | |
| | TGCCCGTGCCCTGGCCCACCCTCGTGACCACCCTGACCTACG | | | | |
| | GCGTGCAGTGCTTCAGCCGCTACCCCGACCACATGAAGCAGC | | | | |
| | ACGACTTCTTCAAGTCCGCCATGCCCGAAGGCTACGTCCAGG | | | | |
| | AGCGCACCATCTTCTTCAAGGACGACGGCAACTACAAGACCC | | | | |
| | GCGCCGAGGTGAAGTTCGAGGGCGACACCCTGGTGAACCGC | | | | |
| | ATCGAGCTGAAGGGCATCGACTTCAAGGAGGACGGCAACAT | | | | |
| | CCTGGGGCACAAGCTGGAGTACAACTACAACAGCCACAACG | | | | |
| | TCTATATCATGGCCGACAAGCAGAAGAACGGCATCAAGGTG | | | | |
| | AACTTCAAGATCCGCCACAACATCGAGGACGGCAGCGTGCA | | | | |
| | GCTCGCCGACCACTACCAGCAGAACACCCCCATCGGCGACG | | | | |
| | GCCCCGTGCTGCTGCCCGACAACCACTACCTGAGCACCCAGT | | | | |
| | CCGCCCTGAGCAAAGACCCCAACGAGAAGCGCGATCACATG | | | | |
| | GTCCTGCTGGAGTTCGTGACCGCCGCCGGGATCACTCTCGGC | | | | |
| | ATGGACGAGCTGTACAAGTAAAGCGGCCGGGGGATCGGCA | | | | |
| | ATAAAAAGACAGAATAAAACGCACGGGTGTTGGGTCGTTTG | | | | |
| | TTC | | | | |

TABLE S2
MusD LTR retrotransposon driver and template construct elements

| | | | SEQ | | SEQ |
|---|---|---|---|---|---|
| | plasmid_ | | ID | | ID |
| Name | id | nucleic_acid_sequence | NO: | protein_sequence | NO: |
| MusD6 U3 | N/A | TGTAGTCTCCCCTCCCCCAGCCTGAAACCTGCTTGCTCAGGGGTGGAG | 296 | N/A | |
| | | CTTCCCGCTCATCGCTCTGCCACGCCCACTGCTGGAACCTGCGGAGCC | | | |
| | | ACACACGTGCACCTTTCTACTGGACCAGAGATTATTCGGCGGGAATC | | | |
| | | GGGTCCCCTCCCCCTTCCTTCATAACTAGTGTCCCAACAATAAAATTT | | | |
| MusD6 R | N/A | GAGCTTTGATCA | 297 | N/A | |
| (full | | | | | |
| length for | | | | | |
| CMV v1 | | | | | |
| and v3 | | | | | |
| designs) | | | | | |
| MusD6 R | N/A | GCTTTGATCA | 298 | N/A | |
| (5′ | | | | | |
| truncated | | | | | |
| for CMV | | | | | |
| v2 | | | | | |
| designs) | | | | | |
| MusD6 U5 | N/A | GAATGAATTTGTCTTGGCTCCGTTTCTTCTTTCGCCCCGTCTAGATTCC | 299 | N/A | |
| | | TCTCTTACAGCTCGAGTGGCCTTCTCAGTCGAACCGTTCACGTTGCGA | | | |
| | | GCTGCTGGCGGCCGCAACA | | | |
| MusD6 | N/A | TGTAGTCTCCCCTCCCCCAGCCTGAAACCTGCTTGCTCAGGGGTGGAG | 300 | N/A | |
| 5′/3′ LTR | | CTTCCCGCTCATCGCTCTGCCACGCCCACTGCTGGAACCTGCGGAGCC | | | |
| | | ACACACGTGCACCTTTCTACTGGACCAGAGATTATTCGGCGGGAATC | | | |
| | | GGGTCCCCTCCCCCTTCCTTCATAACTAGTGTCCCAACAATAAAATTTG | | | |
| | | AGCTTTGATCAGAATGAATTTGTCTTGGCTCCGTTTCTTCTTTCGCCCC | | | |
| | | GTCTAGATTCCTCTCTTACAGCTCGAGTGGCCTTCTCAGTCGAACCGT | | | |
| | | TCACGTTGCGAGCTGCTGGCGGCCGCAACA | | | |
| MusD6 | N/A | TTTTGGCGCCAGAACTGGGACCTGAAGAATGGC | 301 | N/A | |
| PBS | | | | | |
| (larger | | | | | |
| annota- | | | | | |
| tion) | | | | | |
| MusD6 | N/A | TGGCGCCAGAACTGGGAC | 302 | N/A | |
| PBS | | | | | |
| (shorter | | | | | |
| annota- | | | | | |
| tion) | | | | | |
| MusD6 | N/A | ATGGATCAGGCGGTTGCCCATAGTTTTCAGGAGTTGTTTCAGGCCAG | 303 | MDQAVAHSFQELFQARGVRLEVQLVKNFLGKIDSCCP | 329 |
| gag | | AGGAGTAAGGCTTGAAGTACAATTAGTAAAAAATTTTTTAGGTAAGA | | WFKEEETLDCGTWEKVGEALKITQADNFTLGLWALIND | |
| | | TAGATAGCTGTTGCCCATGGTTCAAGGAAGAAGAAACACTAGATTGT | | AIKDATSPGLSCPQAELVVSQEECLSERASSEKDLLNSKID | |
| | | GGAACCTGGGAGAAAGTTGGTGAGGCCTTAAAAATCACTCAGGCAG | | KCGNSDEKLIFNKNHSDRGAAHYLNENWSSCESPAQPV | |
| | | ATAATTTTACCCTAGGCCTCTGGGCACTCATAAATGATGCAATAAAAG | | VPTSGGATHRDTRLSELEFEIKLQRLTNELRELKKMSEAE | |
| | | ATGCCACTTCCCCAGGGCTAAGTTGCCCCCAGGCGGAGCTTGTGGTA | | KSNSSVVHQVPLEKVVSQAHGKGQNISNTLAFPVVEVV | |
| | | TCTCAGGAGGAGTGCCTGTCAGAGAGGGCCTCCTCAGAAAAAGATCT | | DQQDTRGRHYQTLDFKLIKELKAAVVQYGPSAPFTQALL | |
| | | TCTTAACTCAAAAATTGATAAATGTGGAAACTCGGATGAAAAACTGA | | DTVVESHLTPLDWKTLSKATLSGGDFLLWDSEWRDASK | |
| | | TTTTTAACAAAAATCACTCAGATAGAGGAGCTGCCCATTACCTTAATG | | KTAASNAQAGNSDWDSNMLLGEGPYEGQTNQIDFPV | |
| | | AGAATTGGTCCTCTTGTGAATCTCCTGCTCAACCTGTAGTCCCCACTTC | | AVYAQIATAARRAWGRLPVKGEIGGSLASIRQSSDEPYQ | |
| | | GGGAGGTGCCACTCATAGGGACACACGACTAAGCGAGTTAGAGTTT | | DFVDRLLISASRILGNPDTGSPFVMQLAYENANAICRAAI | |
| | | GAGATTAAGCTTCAGAGGCTGACTAATGAGCTTCGGGAACTAAAAAA | | QPHKGTTDLAGYVRLCADIGPSCETLQGTHAQAMFSRK | |
| | | GATGTCAGAAGCGGAGAAGAGTAACTCTTCTGTAGTTCACCAGGTGC | | RGNSACFKCGSLDHFRIDCPQNKGAEVRQTGRAPGICP | |
| | | CGCTAGAAAAGGTTGTGAGTCAGGCTCATGGGAAAGGACAGAATAT | | RCGKGRHWAKDCKHKTRVLSRPVPGNEERGQPQAPSY | |
| | | CTCTAATACGCTAGCCTTTCCTGTGGTTGAGGTAGTTGATCAGCAAGA | | SKKTAYGALNLLPSQQDQFLSLSGQTQETQDWTSVPLS | |
| | | TACTAGGGGCAGACATTACCAGACCTTAGATTTCAAGTTGATAAAAG | | MQH* | |
| | | AGTTAAAGGCGGCTGTTGTGCAATATGGCCCTTCAGCCCCATTCACTC | | | |
| | | AAGCATTACTGGACACAGTTGTGGAGTCACACTTAACCCCTTTAGATT | | | |
| | | GGAAGACTCTTTCTAAGGCTACCCTGTCAGGAGGAGATTTTTTGCTTT | | | |
| | | GGGATTCTGAATGGCGAGACGCCAGTAAGAAAACTGCTGCTTCTAAC | | | |
| | | GCTCAGGCTGGTAATTCAGACTGGGATAGCAACATGCTTTTAGGAGA | | | |
| | | GGGCCCTTATGAGGGACAGACAAATCAGATTGATTTTCCCGTTGCAG | | | |
| | | TGTACGCGCAAATTGCGACGGCCGCACGCCGTGCTTGGGGAAGGTT | | | |
| | | GCCAGTCAAAGGAGAGATTGGTGGAAGTTTAGCTAGCATTCGGCAG | | | |
| | | AGTTCTGATGAACCATATCAGGATTTTGTGGACAGGCTATTGATTTCA | | | |
| | | GCTAGTAGAATCCTTGGAAATCCGGACACGGGAAGTCCTTTCGTTAT | | | |
| | | GCAATTGGCTTATGAGAATGCTAACGCAATTTGCCGAGCTGCGATTC | | | |
| | | AACCGCATAAGGGAACGACAGATTTGGCGGGATATGTCCGTCTTTGC | | | |
| | | GCAGACATCGGGCCTTCCTGCGAGACCTTGCAGGGAACCCACGCGCA | | | |
| | | GGCAATGTTCTCTAGGAAACGAGGGAATAGTGCATGCTTTAAATGTG | | | |
| | | GAAGTTTAGATCATTTTAGAATTGATTGTCCTCAGAACAAGGGCGCC | | | |
| | | GAGGTTAGACAAACAGGCCGTGCCCCGGGAATATGTCCCCGATGTG | | | |
| | | GAAAGGGCCGCCACTGGGCGAAAGATTGCAAGCATAAAACGAGGGT | | | |
| | | TTTGAGCCGCCCGGTGCCGGGAAACGAGGAAAGGGGTCAGCCCCAG | | | |
| | | GCCCCAAGTTACTCAAAGAAGACAGCTTATGGGGCTCTAAATCTGCT | | | |
| | | GCCCAGCCAACAAGATCAGTTCTTGAGCTTGTCAGGTCAAACCCAGG | | | |
| | | AAACGCAAGACTGGACCTCTGTTCCACTGTCCATGCAGCATTAA | | | |
| MusD6 | N/A | AACGAGGGTTTTGAGCCGCCCGGTGCCGGGAAACGAGGAAAGGGGT | 304 | NEGFEPPGAGKRGKGSAPGPKLLKEDSLWGSKSAAQPT | 330 |
| pro | | CAGCCCCAGGCCCCAAGTTACTCAAAGAAGACAGCTTATGGGGCTCT | | RSVLELVRSNPGNARLDLCSTVHAALTPEVGVQTLPTGV | |
| | | AAATCTGCTGCCCAGCCAACAAGATCAGTTCTTGAGCTTGTCAGGTCA | | FGPLPVGTCGFLLGRSSSIVEGLQIYPGVISNDYEGEIKIIA | |
| | | AACCCAGGAAACGCAAGACTGGACCTCTGTTCCACTGTCCATGCAGC | | ACPRGAITIPANQKIAQLTLIPLRWSLSKFSKNEEGQINFD | |
| | | ATTAACCCCAGAAGTGGGAGTCCAAACTCTGCCTACCGGAGTCTTTG | | SSGVNWVKSITNQRPNLKLILDGKSFEGLIDTGADVTIIR | |
| | | GACCACTACCTGTAGGAACCTGTGGTTTTCTCTTAGGACGAAGCAGTT | | GQDWPSNWPLSVSLTHLQGIGYASNPKRSSKLLTWRDE | |
| | | CTATTGTAGAAGGCCTGCAGATTTATCCAGGTGTTATAAGTAATGATT | | DGKSGNIQPYVMQNLPVTLWGRDLLSQMGVILCSSKE | |
| | | ATGAGGGAGAAATTAAAATCATAGCCGCTTGCCCTCGTGGTGCTATA | | MVTEQTFRQGPLPDRGLIKKGQKIKTFEDLKPHSNVRGL | |
| | | ACTATACCCGCTAATCAGAAAATTGCTCAACTTACCTTGATCCCCTTGC | | KYFQ* | |
| | | GCTGGTCACTATCTAAATTCTCTAAAAATGAAGAAGGACAGATTAACT | | | |
| | | TTGACTCCTCTGGCGTAAATTGGGTGAAATCTATCACTAATCAGAGAC | | | |
| | | CTAACCTTAAATTGATTCTTGATGGAAAAAGCTTTGAAGGATTAATAG | | | |
| | | ATACCGGGGCCGATGTAACCATTATTAGAGGGCAGGACTGGCCCTCA | | | |
| | | AACTGGCCCCTGTCTGTTTCCTTGACTCACCTTCAAGGAATTGGTTAT | | | |
| | | GCCAGTAACCCAAAACGTAGTTCCAAATTGCTAACCTGGAGAGATGA | | | |
| | | GGATGGAAAATCAGGAAATATTCAGCCGTATGTTATGCAAAATTTGC | | | |
| | | CTGTAACCCTGTGGGGAAGAGATCTGTTGTCACAGATGGGCGTTATC | | | |
| | | CTGTGCAGTTCTAAGGAAATGGTGACTGAACAGACGTTCAGGCAGG | | | |
| | | GACCCCTGCCTGATCGTGGACTAATAAAGAAGGGACAGAAAATTAAG | | | |
| | | ACTTTTGAAGATCTTAAACCCCACTCTAACGTGAGAGGTTTAAAGTAT | | | |
| | | TTTCAGTAG | | | |
| MusD6 | N/A | CGTGAGAGGTTTAAAGTATTTTCAGTAGTGGCCGCTGTCTTGCCTGCA | 305 | RERFKVFSVVAAVLPASHAEKIQWRNDIPVWVDQWSLP | 331 |
| pol | | TCCCACGCCGAAAAAATTCAATGGCGTAATGATATTCCGGTGTGGGT | | KEKIEAASLLVQEQLEAGHLVESHSPWNTPIFIIRKKSGK | |
| | | AGATCAGTGGTCTTTACCTAAAGAGAAAATAGAGGCCGCTTCTCTGCT | | WRLLQDLRKVNETMVLMGTLQPGLPSPVAIPKGYYKIVI | |
| | | AGTGCAGGAGCAGTTAGAAGCAGGACATTTGGTGGAGTCTCATTCTC | | DLKDCFFTIPLHPEDCERFAFSVPSVNFKEPMKRYQWTV | |
| | | CCTGGAATACACCCATTTTCATTATCAGGAAGAAATCGGGAAAATGG | | LPQGMANSPTLCQKFVAKAIQPVRQQWPNIYIIHFTDD | |
| | | AGACTGTTGCAAGATTTAAGAAAGGTTAATGAAACCATGGTACTTAT | | VLMAGKDPQDLLLCYGDLRKALADKGLQIASEKIQTQDP | |
| | | GGGAACTTTACAACCGGGGCTCCCCTCCCCAGTAGCCATTCCTAAGG | | YNYLGFRLTDQAVFHQKIVIRRDNLRTLNDFQKLLGDIN | |
| | | GATACTATAAGATTGTTATAGATTTGAAAGATTGTTTCTTTACCATCCC | | WLRPYLKLTTGELKPLFDILKGSSDPTSPRSLTSEGLLALQL | |
| | | TTTGCATCCAGAGGATTGTGAGAGATTTGCTTTTAGTGTTCCTTCTGT | | VEKAIEEQFVTYIDYSLPLHLLIFNTTHVPTGLLWQKFPIM | |
| | | AAATTTCAAGGAACCCATGAAAAGATATCAATGGACAGTTCTCCCGC | | WIHSRISPKRNILPYHEAVAQMIITGRRQALTYFGKEPDII | |
| | | AGGGGATGGCTAATAGTCCCACCTTATGTCAAAAGTTTGTGGCAAAG | | VQPYSVSQDTWLKQHSTDWLLAQLGFEGTIDSHYPQDR | |
| | | GCAATTCAGCCTGTTAGACAACAATGGCCAAATATTTACATCATTCAT | | LIKFLNVHDMIFPKMTSLQPLNNALLIFTDGSSKGRAGYL | |
| | | TTCACAGATGATGTTTTGATGGCGGGAAAGGACCCCCAAGATTTGCT | | ISNQQVIVETPGLSAQLAELTAVLKVFQSVQEAFNIFTDSL | |
| | | TTTGTGTTATGGAGACTTACGAAAGGCCCTGGCTGATAAGGGATTAC | | YVAQSVPLLETCGTFNFNTPSGSLFSELQNIILARKNPFYI | |
| | | AAATTGCTTCTGAAAAGATACAAACTCAGGATCCTTATAATTATTTGG | | GHIRSHSGLPGPLAEGNNCIDRALIGEALVSDRVALAQR | |
| | | GTTTTAGACTCACTGACCAAGCTGTTTTTCACCAGAAAATTGTTATTCG | | DHERFHLSSHTLRLRHKITKEQARMIVKQCPKCITLSPVP | |
| | | TAGAGATAACTTAAGGACCTTAAATGATTTTCAAAAATTGTTAGGTGA | | HLGVNPRGLMPNHIWQMDITHYAEFGKLKYIHVCIDTC | |
| | | TATAAACTGGCTTCGCCCCTATCTAAAGCTTACTACAGGGGAGTTGAA | | SGFLFASLHTGEASKNVIDHCLQAFNAMGLPKLIKTDNG | |
| | | ACCTTTATTTGATATTCTTAAAGGGAGTTCTGATCCTACTTCCCCTAGA | | PSYSSKNFISFCKEFGIKHKTGIPYNPMGQGIVERAHRTLK | |
| | | TCCCTAACCTCAGAAGGTTTACTGGCCTTACAGCTAGTGGAAAAGGCT | | NWLFKTKEGQLYPPRSPKAHLAFTLFVLNFLHTDIKGQS | |
| | | ATTGAAGAACAGTTTGTCACTTACATAGATTACTCCCTGCCGCTGCAC | | AADRHWHPVTSNSYALVKWKDPLTNEWKGPDPVLIW | |
| | | CTGTTAATTTTTAACACGACTCATGTGCCTACGGGATTGCTATGGCAA | | GRGSVCVFSRDEDGARWLPERLIRQTNTDSDSSGKYHSK | |
| | | AAATTTCCTATAATGTGGATACATTCAAGGATTTCTCCCAAACGTAAT | | D* | |
| | | ATTTTGCCATATCATGAAGCAGTGGCTCAGATGATTATCACTGGAAGA | | | |
| | | AGGCAGGCATTGACTTATTTTGGAAAGGAGCCAGATATCATTGTCCA | | | |
| | | GCCTTACAGCGTGAGTCAGGACACTTGGCTGAAACAGCATAGTACAG | | | |
| | | ATTGGTTGCTTGCACAATTAGGGTTTGAAGGAACTATAGATAGCCACT | | | |
| | | ACCCCCAAGATAGGTTGATAAAATTCTTAAATGTACATGATATGATAT | | | |
| | | TTCCTAAGATGACTTCCTTACAGCCTTTAAATAATGCTCTATTGATTTT | | | |
| | | TACTGATGGCTCCTCTAAAGGGCGAGCTGGATATCTTATTAGTAATCA | | | |
| | | ACAGGTTATCGTAGAGACTCCTGGTCTCTCGGCTCAGCTCGCCGAACT | | | |
| | | AACAGCAGTACTGAAGGTTTTTCAGTCTGTACAGGAGGCTTTTAATAT | | | |
| | | TTTTACTGACAGTTTATATGTTGCTCAGTCAGTACCCTTATTGGAAACC | | | |
| | | TGTGGTACTTTTAACTTCAATACGCCGTCAGGATCTTTATTTTCAGAAT | | | |
| | | TACAAAACATCATTCTCGCCCGGAAAAATCCGTTTTATATTGGCCACA | | | |
| | | TACGGTCTCACTCTGGTCTTCCTGGACCTCTGGCAGAGGGTAATAATT | | | |
| | | GCATTGACAGAGCTCTAATAGGAGAAGCCTTAGTTTCAGATCGGGTT | | | |
| | | GCTTTGGCCCAACGTGATCATGAAAGGTTTCATCTCTCTAGCCATACC | | | |
| | | CTAAGGCTCCGACATAAGATCACCAAGGAGCAAGCGAGAATGATTGT | | | |
| | | AAAACAATGTCCTAAATGTATTACTTTATCTCCAGTGCCGCATCTAGG | | | |
| | | AGTTAATCCTAGAGGCCTTATGCCTAATCATATTTGGCAAATGGATAT | | | |
| | | AACCCATTATGCAGAATTTGGAAAACTAAAATATATACATGTTTGCAT | | | |
| | | TGATACTTGTTCAGGATTTCTCTTTGCTTCTCTGCATACAGGAGAAGCT | | | |
| | | TCAAAAAACGTAATTGATCATTGCCTACAAGCATTTAATGCCATGGGA | | | |
| | | TTACCTAAACTTATTAAGACAGACAATGGGCCATCTTATTCCAGTAAA | | | |
| | | AACTTTATTTCATTCTGTAAAGAATTCGGTATTAAACATAAAACTGGA | | | |
| | | ATTCCTTACAACCCCATGGGACAAGGAATAGTTGAACGTGCTCATCGC | | | |
| | | ACCTTAAAGAATTGGCTCTTTAAGACAAAAGAGGGGCAGCTATATCC | | | |
| | | CCCAAGGTCTCCAAAGGCCCACCTTGCCTTCACCTTATTTGTCCTAAAT | | | |
| | | TTCTTGCACACCGATATCAAGGGCCAGTCTGCAGCGGATCGCCACTG | | | |
| | | GCATCCAGTTACTTCTAATTCTTATGCATTGGTAAAATGGAAGGACCC | | | |
| | | CCTGACTAATGAATGGAAGGGTCCAGATCCAGTTCTAATTTGGGGTA | | | |
| | | GAGGCTCAGTTTGTGTTTTTTCACGAGATGAAGATGGAGCACGGTGG | | | |
| | | CTGCCAGAGAGATTAATTCGTCAGACGAACACAGATTCTGACTCTTCT | | | |
| | | GGTAAGTATCATTCTAAAGACTAA | | | |
| MusD6 5′ | N/A | AGAGAGATGCTAAGAGGAACGCTGCTTTGGAGCTCCACAGGAAAGG | 306 | N/A | |
| flank | | ATCTTCGTATCGGACATCGGAGCAACGGACAGGTACACATGCTAGCG | | | |
| | | CTAGCTTAAAATTTCAGTTTTGTAAAGTGTTGCTGAGGATGTGGTAGG | | | |
| | | ATACGAATTAAGCTTGAATCAGTGCTAACCCAACGCTGGTTCTGCTTG | | | |
| | | GGTCAGCAGCGTGTTAATCGGAACTAGAAACGGAAACAGGCAGGTT | | | |
| | | AGCCGCAGCTTTTTAGGAAGCTGCTTAGGTGGAAGAAGAAAGGGTTT | | | |
| | | AAAGTC | | | |
| MusD6 3′ | N/A | AATTCCTTTTGTGCTTAAAATTCAGCTGAGAGCAACAGCTCTCAAAGC | 307 | N/A | |
| flank | | TGTTCTCCAGCTACTCTCTGAGCCAGCTCCCGACAGGAGGCCGGAGA | | | |
| | | CTAGCCTCAGCTTTACAATTTGCATTTAAATAAAGTACCTAGACTTCCC | | | |
| | | CGAAAAAAGTTCTGCTTTTCTACTTTCTCACTGTCTTTCAAGATTTTGT | | | |
| | | CTTTCAAGCAGGTAAATCAACATTCTCGAGGCGGACCAGCGGATGTG | | | |
| | | CATCCCCGCCCCCCTAGAGCACTCAGGTGGCAGCTGTTATCCCCAGTC | | | |
| | | TCAGGACATTCCAGCATGTGGCCTTCAGTCTGAGTTAAAAATTAGGTT | | | |
| | | TACCCAGAGGACTAGAATAGTAGATATTTCTATATTAATAAAGATTGG | | | |
| | | TTTTTATTTTGATAGACAGGCTTAGCCCCTTAGCTGACCTCTGGCTTTT | | | |
| | | CACCCTTGCTGTTACTGCAAGGTGTCTTTAGCTCAATAAGGCTGTGGA | | | |
| | | AAAAAACAGGGATGAGGAGGAACGGCTCCCAGCTCCTATTTTAGCCA | | | |
| | | CAAATCGTGGTGTTACTAACGACATAATTCTTGCTTAGGCTTTGCTAA | | | |
| | | ATCTGAGGTTGATAATTCTCCTTTAGGAGCTGCACAGCGCTCAGAACT | | | |
| | | GTGCATACTGATTTGTGATGGTACAAATTCAGTATGGGCATCGCTTG | | | |
| | | GTGCAGATGGAGGTACTGCAAGGAAAGGTCCCAGCTTGACCATTTCT | | | |
| | | GAGTTTCCTGTGAGATAAACCCGGTTTGAAAGAGGTTGGTACCAAAT | | | |
| | | TATATATCCCTCGGCTCTACCTCGCCTCCCCAAAAGGTACCAGAGCCA | | | |
| | | CAGGTGTGGATTTTAACAGAATCCACGGGAGGAATCGGGTCCATGTC | | | |
| | | CACCCAAGCCAAGGTTAAAAGCCCACTCATCTACGGATGAGAAAATC | | | |
| | | ATTTGATCACCTCAGTTAAGCGCTGCCTTATTTTAACTTAATTAATAGG | | | |
| | | GGGGAGAGAGATTGGAGACTTACTATTGAAAGGGCAAGCCCTTCACT | | | |
| | | GCCTCCCACCCAAATAAAAAAGCCAATTGGCCTTGTACTACAGAGCTG | | | |
| | | GCCGGACCCCTTATCCCTGTTACCCACCAATCATCCAAAAATGCGGAG | | | |
| | | GAATATCAACTTAGTGTTATTCTTATTATAGTGTATTTCACACTTGTTC | | | |
| | | AGTCAAACTTAGCCAGAGTTCCAACGCCCTACTTAAAATTCAACTAGA | | | |
| | | AAGTTACCTACCAAGTACTAATTAGCATTATAAAGTCAGAGCCTACAG | | | |
| | | CTCCAGGCTTTTCAGTTAGTTGTTTACTAAGATAAGAAAAGACAGTCT | | | |
| | | TAGCCAGATACAGTTTACCATAATAAAAGTTAAAGAATCCCAGGGAA | | | |
| | | GCAAGTTTTTTCTTTTAGCCCTAGATTCCAGGCAGAACTATTGAGCAT | | | |
| | | AGATAATTTTTCCCCC | | | |
| MusD | N/A | TTTTAGCGACTAAACACATCACTGAAGAATCCG | 308 | N/A | |
| PBS* | | | | | |
| (larger | | | | | |
| annota- | | | | | |
| tion) | | | | | |
| MusD | N/A | TAGCGACTAAACACATCA | 309 | N/A | |
| PBS* | | | | | |
| (smaller | | | | | |
| annota- | | | | | |
| tion) | | | | | |
| MusD6 | N/A | TCAGGCCAGCTTTTTCTTTTTTTTTAATTTTGTTAATAAAAGGGAGGAG | 310 | N/A | |
| PPT | | A | | | |
| (larger | | | | | |
| annota- | | | | | |
| tion) | | | | | |
| MusD6 | N/A | AAAAGGGAGGAGA | 311 | N/A | |
| PPT | | | | | |
| (shorter | | | | | |
| annota- | | | | | |
| tion) | | | | | |
| DRIVER_ | PLV10038 | GAATTCGAGCTTGCATGCCTGCAGGTCGTTACATAACTTACGGTAAAT | 312 | N/A | |
| COMPACT_ | | GGCCCGCCTGGCTGACCGCCCAACGACCCCCGCCCATTGACGTCAAT | | | |
| pCMV_ | | AATGACGTATGTTCCCATAGTAACGCCAATAGGGACTTTCCATTGACG | | | |
| MusD6- | | TCAATGGGTGGAGTATTTACGGTAAACTGCCCACTTGGCAGTACATC | | | |
| delPol | | AAGTGTATCATATGCCAAGTACGCCCCCTATTGACGTCAATGACGGTA | | | |
| | | AATGGCCCGCCTGGCATTATGCCCAGTACATGACCTTATGGGACTTTC | | | |
| | | CTACTTGGCAGTACATCTACGTATTAGTCATCGCTATTACCATGGTGA | | | |
| | | TGCGGTTTTGGCAGTACATCAATGGGCGTGGATAGCGGTTTGACTCA | | | |
| | | CGGGGATTTCCAAGTCTCCACCCCATTGACGTCAATGGGAGTTTGTTT | | | |
| | | TGGCACCAAAATCAACGGGACTTTCCAAAATGTCGTAACAACTCCGCC | | | |
| | | CCATTGACGCAAATGGGCGGTAGGCGTGTACGGTGGGAGGTCTATA | | | |
| | | TAAGCAGAGCTCGTTTAGTGAACCGTCAGATCGCCGCCACCATGGAT | | | |
| | | CAGGCGGTTGCCCATAGTTTTCAGGAGTTGTTTCAGGCCAGAGGAGT | | | |
| | | AAGGCTTGAAGTACAATTAGTAAAAAATTTTTTAGGTAAGATAGATA | | | |
| | | GCTGTTGCCCATGGTTCAAGGAAGAAGAAACACTAGATTGTGGAACC | | | |
| | | TGGGAGAAAGTTGGTGAGGCCTTAAAAATCACTCAGGCAGATAATTT | | | |
| | | TACCCTAGGCCTCTGGGCACTCATAAATGATGCAATAAAAGATGCCA | | | |
| | | CTTCCCCAGGGCTAAGTTGCCCCCAGGCGGAGCTTGTGGTATCTCAG | | | |
| | | GAGGAGTGCCTGTCAGAGAGGGCCTCCTCAGAAAAAGATCTTCTTAA | | | |
| | | CTCAAAAATTGATAAATGTGGAAACTCGGATGAAAAACTGATTTTTAA | | | |
| | | CAAAAATCACTCAGATAGAGGAGCTGCCCATTACCTTAATGAGAATT | | | |
| | | GGTCCTCTTGTGAATCTCCTGCTCAACCTGTAGTCCCCACTTCGGGAG | | | |
| | | GTGCCACTCATAGGGACACACGACTAAGCGAGTTAGAGTTTGAGATT | | | |
| | | AAGCTTCAGAGGCTGACTAATGAGCTTCGGGAACTAAAAAAGATGTC | | | |
| | | AGAAGCGGAGAAGAGTAACTCTTCTGTAGTTCACCAGGTGCCGCTAG | | | |
| | | AAAAGGTTGTGAGTCAGGCTCATGGGAAAGGACAGAATATCTCTAAT | | | |
| | | ACGCTAGCCTTTCCTGTGGTTGAGGTAGTTGATCAGCAAGATACTAG | | | |
| | | GGGCAGACATTACCAGACCTTAGATTTCAAGTTGATAAAAGAGTTAA | | | |
| | | AGGCGGCTGTTGTGCAATATGGCCCTTCAGCCCCATTCACTCAAGCAT | | | |
| | | TACTGGACACAGTTGTGGAGTCACACTTAACCCCTTTAGATTGGAAGA | | | |
| | | CTCTTTCTAAGGCTACCCTGTCAGGAGGAGATTTTTTGCTTTGGGATT | | | |
| | | CTGAATGGCGAGACGCCAGTAAGAAAACTGCTGCTTCTAACGCTCAG | | | |
| | | GCTGGTAATTCAGACTGGGATAGCAACATGCTTTTAGGAGAGGGCCC | | | |
| | | TTATGAGGGACAGACAAATCAGATTGATTTTCCCGTTGCAGTGTACGC | | | |
| | | GCAAATTGCGACGGCCGCACGCCGTGCTTGGGGAAGGTTGCCAGTC | | | |
| | | AAAGGAGAGATTGGTGGAAGTTTAGCTAGCATTCGGCAGAGTTCTGA | | | |
| | | TGAACCATATCAGGATTTTGTGGACAGGCTATTGATTTCAGCTAGTAG | | | |
| | | AATCCTTGGAAATCCGGACACGGGAAGTCCTTTCGTTATGCAATTGGC | | | |
| | | TTATGAGAATGCTAACGCAATTTGCCGAGCTGCGATTCAACCGCATAA | | | |
| | | GGGAACGACAGATTTGGCGGGATATGTCCGTCTTTGCGCAGACATCG | | | |
| | | GGCCTTCCTGCGAGACCTTGCAGGGAACCCACGCGCAGGCAATGTTC | | | |
| | | TCTAGGAAACGAGGGAATAGTGCATGCTTTAAATGTGGAAGTTTAGA | | | |
| | | TCATTTTAGAATTGATTGTCCTCAGAACAAGGGCGCCGAGGTTAGAC | | | |
| | | AAACAGGCCGTGCCCCGGGAATATGTCCCCGATGTGGAAAGGGCCG | | | |
| | | CCACTGGGCGAAAGATTGCAAGCATAAAACGAGGGTTTTGAGCCGCC | | | |
| | | CGGTGCCGGGAAACGAGGAAAGGGGTCAGCCCCAGGCCCCAAGTTA | | | |
| | | CTCAAAGAAGACAGCTTATGGGGCTCTAAATCTGCTGCCCAGCCAAC | | | |
| | | AAGATCAGTTCTTGAGCTTGTCAGGTCAAACCCAGGAAACGCAAGAC | | | |
| | | TGGACCTCTGTTCCACTGTCCATGCAGCATTAACCCCAGAAGTGGGA | | | |
| | | GTCCAAACTCTGCCTACCGGAGTCTTTGGACCACTACCTGTAGGAACC | | | |
| | | TGTGGTTTTCTCTTAGGACGAAGCAGTTCTATTGTAGAAGGCCTGCAG | | | |
| | | ATTTATCCAGGTGTTATAAGTAATGATTATGAGGGAGAAATTAAAATC | | | |
| | | ATAGCCGCTTGCCCTCGTGGTGCTATAACTATACCCGCTAATCAGAAA | | | |
| | | ATTGCTCAACTTACCTTGATCCCCTTGCGCTGGTCACTATCTAAATTCT | | | |
| | | CTAAAAATGAAGAAGGACAGATTAACTTTGACTCCTCTGGCGTAAATT | | | |
| | | GGGTGAAATCTATCACTAATCAGAGACCTAACCTTAAATTGATTCTTG | | | |
| | | ATGGAAAAAGCTTTGAAGGATTAATAGATACCGGGGCCGATGTAACC | | | |
| | | ATTATTAGAGGGCAGGACTGGCCCTCAAACTGGCCCCTGTCTGTTTCC | | | |
| | | TTGACTCACCTTCAAGGAATTGGTTATGCCAGTAACCCAAAACGTAGT | | | |
| | | TCCAAATTGCTAACCTGGAGAGATGAGGATGGAAAATCAGGAAATAT | | | |
| | | TCAGCCGTATGTTATGCAAAATTTGCCTGTAACCCTGTGGGGAAGAG | | | |
| | | ATCTGTTGTCACAGATGGGCGTTATCCTGTGCAGTTCTAAGGAAATG | | | |
| | | GTGACTGAACAGACGTTCAGGCAGGGACCCCTGCCTGATCGTGGACT | | | |
| | | AATAAAGAAGGGACAGAAAATTAAGACTTTTGAAGATCTTAAACCCC | | | |
| | | ACTCTAACGTGAGAGGTTTAAAGTATTTTCAGTAGTGTAAGCGGCCG | | | |
| | | CAACAGGGGATCCAGACATGATAAGATACATTGATGAGTTTGGACAA | | | |
| | | ACCACAACTAGAATGCAGTGAAAAAAATGCTTTATTTGTGAAATTTGT | | | |
| | | GATGCTATTGCTTTATTTGTAACCATTATAAGCTGCAATAAACAAGTT | | | |
| | | AACAACAACAATTGCATTCATTTTATGTTTCAGGTTCAGGGGGAGGTG | | | |
| | | TGGGAGGTTTTTTCGGATCCTCTAGAGTCGACCTGCAGGCATGCAAG | | | |
| | | CTTGGCGTAATCATGGTCATAGCTGTTTCCTGTGTGAAATTGTTATCC | | | |
| | | GCTCACAATTCCACACAACATACGAGCCGGAAGCATAAAGTGTAAAG | | | |
| | | CCTGGGGTGCCTAATGAGTGAGCTAACTCACATTAATTGCGTTGCGCT | | | |
| | | CACTGCCCGCTTTCCAGTCGGGAAACCTGTCGTGCCAGCTGCATTAAT | | | |
| | | GAATCGGCCAACGCGCGGGGAGAGGCGGTTTGCGTATTGGGCGCTC | | | |
| | | TTCCGCTTCCTCGCTCACTGACTCGCTGCGCTCGGTCGTTCGGCTGCG | | | |
| | | GCGAGCGGTATCAGCTCACTCAAAGGCGGTAATACGGTTATCCACAG | | | |
| | | AATCAGGGGATAACGCAGGAAAGAACATGTGAGCAAAAGGCCAGCA | | | |
| | | AAAGGCCAGGAACCGTAAAAAGGCCGCGTTGCTGGCGTTTTTCCATA | | | |
| | | GGCTCCGCCCCCCTGACGAGCATCACAAAAATCGACGCTCAAGTCAG | | | |
| | | AGGTGGCGAAACCCGACAGGACTATAAAGATACCAGGCGTTTCCCCC | | | |
| | | TGGAAGCTCCCTCGTGCGCTCTCCTGTTCCGACCCTGCCGCTTACCGG | | | |
| | | ATACCTGTCCGCCTTTCTCCCTTCGGGAAGCGTGGCGCTTTCTCATAG | | | |
| | | CTCACGCTGTAGGTATCTCAGTTCGGTGTAGGTCGTTCGCTCCAAGCT | | | |
| | | GGGCTGTGTGCACGAACCCCCCGTTCAGCCCGACCGCTGCGCCTTATC | | | |
| | | CGGTAACTATCGTCTTGAGTCCAACCCGGTAAGACACGACTTATCGCC | | | |
| | | ACTGGCAGCAGCCACTGGTAACAGGATTAGCAGAGCGAGGTATGTA | | | |
| | | GGCGGTGCTACAGAGTTCTTGAAGTGGTGGCCTAACTACGGCTACAC | | | |
| | | TAGAAGGACAGTATTTGGTATCTGCGCTCTGCTGAAGCCAGTTACCTT | | | |
| | | CGGAAAAAGAGTTGGTAGCTCTTGATCCGGCAAACAAACCACCGCTG | | | |
| | | GTAGCGGTGGTTTTTTTGTTTGCAAGCAGCAGATTACGCGCAGAAAA | | | |
| | | AAAGGATCTCAAGAAGATCCTTTGATCTTTTCTACGGGGTCTGACGCT | | | |
| | | CAGTGGAACGAAAACTCACGTTAAGGGATTTTGGTCATGAGATTATC | | | |
| | | AAAAAGGATCTTCACCTAGATCCTTTTAAATTAAAAATGAAGTTTTAA | | | |
| | | ATCAATCTAAAGTATATATGAGTAAACTTGGTCTGACAGTTACCAATG | | | |
| | | CTTAATCAGTGAGGCACCTATCTCAGCGATCTGTCTATTTCGTTCATCC | | | |
| | | ATAGTTGCCTGACTCCCCGTCGTGTAGATAACTACGATACGGGAGGG | | | |
| | | CTTACCATCTGGCCCCAGTGCTGCAATGATACCGCGAGACCCACGCTC | | | |
| | | ACCGGCTCCAGATTTATCAGCAATAAACCAGCCAGCCGGAAGGGCCG | | | |
| | | AGCGCAGAAGTGGTCCTGCAACTTTATCCGCCTCCATCCAGTCTATTA | | | |
| | | ATTGTTGCCGGGAAGCTAGAGTAAGTAGTTCGCCAGTTAATAGTTTG | | | |
| | | CGCAACGTTGTTGCCATTGCTACAGGCATCGTGGTGTCACGCTCGTCG | | | |
| | | TTTGGTATGGCTTCATTCAGCTCCGGTTCCCAACGATCAAGGCGAGTT | | | |
| | | ACATGATCCCCCATGTTGTGCAAAAAAGCGGTTAGCTCCTTCGGTCCT | | | |
| | | CCGATCGTTGTCAGAAGTAAGTTGGCCGCAGTGTTATCACTCATGGTT | | | |
| | | ATGGCAGCACTGCATAATTCTCTTACTGTCATGCCATCCGTAAGATGC | | | |
| | | TTTTCTGTGACTGGTGAGTACTCAACCAAGTCATTCTGAGAATAGTGT | | | |
| | | ATGCGGCGACCGAGTTGCTCTTGCCCGGCGTCAATACGGGATAATAC | | | |
| | | CGCGCCACATAGCAGAACTTTAAAAGTGCTCATCATTGGAAAACGTTC | | | |
| | | TTCGGGGCGAAAACTCTCAAGGATCTTACCGCTGTTGAGATCCAGTTC | | | |
| | | GATGTAACCCACTCGTGCACCCAACTGATCTTCAGCATCTTTTACTTTC | | | |
| | | ACCAGCGTTTCTGGGTGAGCAAAAACAGGAAGGCAAAATGCCGCAA | | | |
| | | AAAAGGGAATAAGGGCGACACGGAAATGTTGAATACTCATACTCTTC | | | |
| | | CTTTTTCAATATTATTGAAGCATTTATCAGGGTTATTGTCTCATGAGCG | | | |
| | | GATACATATTTGAATGTATTTAGAAAAATAAACAAATAGGGGTTCCG | | | |
| | | CGCACATTTCCCCGAAAAGTGCCACCTGACGTCTAAGAAACCATTATT | | | |
| | | ATCATGACATTAACCTATAAAAATAGGCGTATCACGAGGCCCTTTCGT | | | |
| | | CTCGCGCGTTTCGGTGATGACGGTGAAAACCTCTGACACATGCAGCT | | | |
| | | CCCGGAGACGGTCACAGCTTGTCTGTAAGCGGATGCCGGGAGCAGA | | | |
| | | CAAGCCCGTCAGGGCGCGTCAGCGGGTGTTGGCGGGTGTCGGGGCT | | | |
| | | GGCTTAACTATGCGGCATCAGAGCAGATTGTACTGAGAGTGCACCAT | | | |
| | | ATGCGGTGTGAAATACCGCACAGATGCGTAAGGAGAAAATACCGCA | | | |
| | | TCAGGCGCCATTCGCCATTCAGGCTGCGCAACTGTTGGGAAGGGCGA | | | |
| | | TCGGTGCGGGCCTCTTCGCTATTACGCCAGCTGGCGAAAGGGGGATG | | | |
| | | TGCTGCAAGGCGATTAAGTTGGGTAACGCCAGGGTTTTCCCAGTCAC | | | |
| | | GACGTTGTAAAACGACGGCCAGT | | | |
| DRIVER_ | PLV10039 | GAATTCGAGCTTGCATGCCTGCAGGTCGTTACATAACTTACGGTAAAT | 313 | N/A | |
| COMPACT_ | | GGCCCGCCTGGCTGACCGCCCAACGACCCCCGCCCATTGACGTCAAT | | | |
| pCMV_ | | AATGACGTATGTTCCCATAGTAACGCCAATAGGGACTTTCCATTGACG | | | |
| MusD6 | | TCAATGGGTGGAGTATTTACGGTAAACTGCCCACTTGGCAGTACATC | | | |
| | | AAGTGTATCATATGCCAAGTACGCCCCCTATTGACGTCAATGACGGTA | | | |
| | | AATGGCCCGCCTGGCATTATGCCCAGTACATGACCTTATGGGACTTTC | | | |
| | | CTACTTGGCAGTACATCTACGTATTAGTCATCGCTATTACCATGGTGA | | | |
| | | TGCGGTTTTGGCAGTACATCAATGGGCGTGGATAGCGGTTTGACTCA | | | |
| | | CGGGGATTTCCAAGTCTCCACCCCATTGACGTCAATGGGAGTTTGTTT | | | |
| | | TGGCACCAAAATCAACGGGACTTTCCAAAATGTCGTAACAACTCCGCC | | | |
| | | CCATTGACGCAAATGGGCGGTAGGCGTGTACGGTGGGAGGTCTATA | | | |
| | | TAAGCAGAGCTCGTTTAGTGAACCGTCAGATCGCCGCCACCATGGAT | | | |
| | | CAGGCGGTTGCCCATAGTTTTCAGGAGTTGTTTCAGGCCAGAGGAGT | | | |
| | | AAGGCTTGAAGTACAATTAGTAAAAAATTTTTTAGGTAAGATAGATA | | | |
| | | GCTGTTGCCCATGGTTCAAGGAAGAAGAAACACTAGATTGTGGAACC | | | |
| | | TGGGAGAAAGTTGGTGAGGCCTTAAAAATCACTCAGGCAGATAATTT | | | |
| | | TACCCTAGGCCTCTGGGCACTCATAAATGATGCAATAAAAGATGCCA | | | |
| | | CTTCCCCAGGGCTAAGTTGCCCCCAGGCGGAGCTTGTGGTATCTCAG | | | |
| | | GAGGAGTGCCTGTCAGAGAGGGCCTCCTCAGAAAAAGATCTTCTTAA | | | |
| | | CTCAAAAATTGATAAATGTGGAAACTCGGATGAAAAACTGATTTTTAA | | | |
| | | CAAAAATCACTCAGATAGAGGAGCTGCCCATTACCTTAATGAGAATT | | | |
| | | GGTCCTCTTGTGAATCTCCTGCTCAACCTGTAGTCCCCACTTCGGGAG | | | |
| | | GTGCCACTCATAGGGACACACGACTAAGCGAGTTAGAGTTTGAGATT | | | |
| | | AAGCTTCAGAGGCTGACTAATGAGCTTCGGGAACTAAAAAAGATGTC | | | |
| | | AGAAGCGGAGAAGAGTAACTCTTCTGTAGTTCACCAGGTGCCGCTAG | | | |
| | | AAAAGGTTGTGAGTCAGGCTCATGGGAAAGGACAGAATATCTCTAAT | | | |
| | | ACGCTAGCCTTTCCTGTGGTTGAGGTAGTTGATCAGCAAGATACTAG | | | |
| | | GGGCAGACATTACCAGACCTTAGATTTCAAGTTGATAAAAGAGTTAA | | | |
| | | AGGCGGCTGTTGTGCAATATGGCCCTTCAGCCCCATTCACTCAAGCAT | | | |
| | | TACTGGACACAGTTGTGGAGTCACACTTAACCCCTTTAGATTGGAAGA | | | |
| | | CTCTTTCTAAGGCTACCCTGTCAGGAGGAGATTTTTTGCTTTGGGATT | | | |
| | | CTGAATGGCGAGACGCCAGTAAGAAAACTGCTGCTTCTAACGCTCAG | | | |
| | | GCTGGTAATTCAGACTGGGATAGCAACATGCTTTTAGGAGAGGGCCC | | | |
| | | TTATGAGGGACAGACAAATCAGATTGATTTTCCCGTTGCAGTGTACGC | | | |
| | | GCAAATTGCGACGGCCGCACGCCGTGCTTGGGGAAGGTTGCCAGTC | | | |
| | | AAAGGAGAGATTGGTGGAAGTTTAGCTAGCATTCGGCAGAGTTCTGA | | | |
| | | TGAACCATATCAGGATTTTGTGGACAGGCTATTGATTTCAGCTAGTAG | | | |
| | | AATCCTTGGAAATCCGGACACGGGAAGTCCTTTCGTTATGCAATTGGC | | | |
| | | TTATGAGAATGCTAACGCAATTTGCCGAGCTGCGATTCAACCGCATAA | | | |
| | | GGGAACGACAGATTTGGCGGGATATGTCCGTCTTTGCGCAGACATCG | | | |
| | | GGCCTTCCTGCGAGACCTTGCAGGGAACCCACGCGCAGGCAATGTTC | | | |
| | | TCTAGGAAACGAGGGAATAGTGCATGCTTTAAATGTGGAAGTTTAGA | | | |
| | | TCATTTTAGAATTGATTGTCCTCAGAACAAGGGCGCCGAGGTTAGAC | | | |
| | | AAACAGGCCGTGCCCCGGGAATATGTCCCCGATGTGGAAAGGGCCG | | | |
| | | CCACTGGGCGAAAGATTGCAAGCATAAAACGAGGGTTTTGAGCCGCC | | | |
| | | CGGTGCCGGGAAACGAGGAAAGGGGTCAGCCCCAGGCCCCAAGTTA | | | |
| | | CTCAAAGAAGACAGCTTATGGGGCTCTAAATCTGCTGCCCAGCCAAC | | | |
| | | AAGATCAGTTCTTGAGCTTGTCAGGTCAAACCCAGGAAACGCAAGAC | | | |
| | | TGGACCTCTGTTCCACTGTCCATGCAGCATTAACCCCAGAAGTGGGA | | | |
| | | GTCCAAACTCTGCCTACCGGAGTCTTTGGACCACTACCTGTAGGAACC | | | |
| | | TGTGGTTTTCTCTTAGGACGAAGCAGTTCTATTGTAGAAGGCCTGCAG | | | |
| | | ATTTATCCAGGTGTTATAAGTAATGATTATGAGGGAGAAATTAAAATC | | | |
| | | ATAGCCGCTTGCCCTCGTGGTGCTATAACTATACCCGCTAATCAGAAA | | | |
| | | ATTGCTCAACTTACCTTGATCCCCTTGCGCTGGTCACTATCTAAATTCT | | | |
| | | CTAAAAATGAAGAAGGACAGATTAACTTTGACTCCTCTGGCGTAAATT | | | |
| | | GGGTGAAATCTATCACTAATCAGAGACCTAACCTTAAATTGATTCTTG | | | |
| | | ATGGAAAAAGCTTTGAAGGATTAATAGATACCGGGGCCGATGTAACC | | | |
| | | ATTATTAGAGGGCAGGACTGGCCCTCAAACTGGCCCCTGTCTGTTTCC | | | |
| | | TTGACTCACCTTCAAGGAATTGGTTATGCCAGTAACCCAAAACGTAGT | | | |
| | | TCCAAATTGCTAACCTGGAGAGATGAGGATGGAAAATCAGGAAATAT | | | |
| | | TCAGCCGTATGTTATGCAAAATTTGCCTGTAACCCTGTGGGGAAGAG | | | |
| | | ATCTGTTGTCACAGATGGGCGTTATCCTGTGCAGTTCTAAGGAAATG | | | |
| | | GTGACTGAACAGACGTTCAGGCAGGGACCCCTGCCTGATCGTGGACT | | | |
| | | AATAAAGAAGGGACAGAAAATTAAGACTTTTGAAGATCTTAAACCCC | | | |
| | | ACTCTAACGTGAGAGGTTTAAAGTATTTTCAGTAGTGGCCGCTGTCTT | | | |
| | | GCCTGCATCCCACGCCGAAAAAATTCAATGGCGTAATGATATTCCGGT | | | |
| | | GTGGGTAGATCAGTGGTCTTTACCTAAAGAGAAAATAGAGGCCGCTT | | | |
| | | CTCTGCTAGTGCAGGAGCAGTTAGAAGCAGGACATTTGGTGGAGTCT | | | |
| | | CATTCTCCCTGGAATACACCCATTTTCATTATCAGGAAGAAATCGGGA | | | |
| | | AAATGGAGACTGTTGCAAGATTTAAGAAAGGTTAATGAAACCATGGT | | | |
| | | ACTTATGGGAACTTTACAACCGGGGCTCCCCTCCCCAGTAGCCATTCC | | | |
| | | TAAGGGATACTATAAGATTGTTATAGATTTGAAAGATTGTTTCTTTAC | | | |
| | | CATCCCTTTGCATCCAGAGGATTGTGAGAGATTTGCTTTTAGTGTTCC | | | |
| | | TTCTGTAAATTTCAAGGAACCCATGAAAAGATATCAATGGACAGTTCT | | | |
| | | CCCGCAGGGGATGGCTAATAGTCCCACCTTATGTCAAAAGTTTGTGG | | | |
| | | CAAAGGCAATTCAGCCTGTTAGACAACAATGGCCAAATATTTACATCA | | | |
| | | TTCATTTCACAGATGATGTTTTGATGGCGGGAAAGGACCCCCAAGATT | | | |
| | | TGCTTTTGTGTTATGGAGACTTACGAAAGGCCCTGGCTGATAAGGGA | | | |
| | | TTACAAATTGCTTCTGAAAAGATACAAACTCAGGATCCTTATAATTATT | | | |
| | | TGGGTTTTAGACTCACTGACCAAGCTGTTTTTCACCAGAAAATTGTTA | | | |
| | | TTCGTAGAGATAACTTAAGGACCTTAAATGATTTTCAAAAATTGTTAG | | | |
| | | GTGATATAAACTGGCTTCGCCCCTATCTAAAGCTTACTACAGGGGAGT | | | |
| | | TGAAACCTTTATTTGATATTCTTAAAGGGAGTTCTGATCCTACTTCCCC | | | |
| | | TAGATCCCTAACCTCAGAAGGTTTACTGGCCTTACAGCTAGTGGAAAA | | | |
| | | GGCTATTGAAGAACAGTTTGTCACTTACATAGATTACTCCCTGCCGCT | | | |
| | | GCACCTGTTAATTTTTAACACGACTCATGTGCCTACGGGATTGCTATG | | | |
| | | GCAAAAATTTCCTATAATGTGGATACATTCAAGGATTTCTCCCAAACG | | | |
| | | TAATATTTTGCCATATCATGAAGCAGTGGCTCAGATGATTATCACTGG | | | |
| | | AAGAAGGCAGGCATTGACTTATTTTGGAAAGGAGCCAGATATCATTG | | | |
| | | TCCAGCCTTACAGCGTGAGTCAGGACACTTGGCTGAAACAGCATAGT | | | |
| | | ACAGATTGGTTGCTTGCACAATTAGGGTTTGAAGGAACTATAGATAG | | | |
| | | CCACTACCCCCAAGATAGGTTGATAAAATTCTTAAATGTACATGATAT | | | |
| | | GATATTTCCTAAGATGACTTCCTTACAGCCTTTAAATAATGCTCTATTG | | | |
| | | ATTTTTACTGATGGCTCCTCTAAAGGGCGAGCTGGATATCTTATTAGT | | | |
| | | AATCAACAGGTTATCGTAGAGACTCCTGGTCTCTCGGCTCAGCTCGCC | | | |
| | | GAACTAACAGCAGTACTGAAGGTTTTTCAGTCTGTACAGGAGGCTTTT | | | |
| | | AATATTTTTACTGACAGTTTATATGTTGCTCAGTCAGTACCCTTATTGG | | | |
| | | AAACCTGTGGTACTTTTAACTTCAATACGCCGTCAGGATCTTTATTTTC | | | |
| | | AGAATTACAAAACATCATTCTCGCCCGGAAAAATCCGTTTTATATTGG | | | |
| | | CCACATACGGTCTCACTCTGGTCTTCCTGGACCTCTGGCAGAGGGTAA | | | |
| | | TAATTGCATTGACAGAGCTCTAATAGGAGAAGCCTTAGTTTCAGATCG | | | |
| | | GGTTGCTTTGGCCCAACGTGATCATGAAAGGTTTCATCTCTCTAGCCA | | | |
| | | TACCCTAAGGCTCCGACATAAGATCACCAAGGAGCAAGCGAGAATGA | | | |
| | | TTGTAAAACAATGTCCTAAATGTATTACTTTATCTCCAGTGCCGCATCT | | | |
| | | AGGAGTTAATCCTAGAGGCCTTATGCCTAATCATATTTGGCAAATGGA | | | |
| | | TATAACCCATTATGCAGAATTTGGAAAACTAAAATATATACATGTTTG | | | |
| | | CATTGATACTTGTTCAGGATTTCTCTTTGCTTCTCTGCATACAGGAGAA | | | |
| | | GCTTCAAAAAACGTAATTGATCATTGCCTACAAGCATTTAATGCCATG | | | |
| | | GGATTACCTAAACTTATTAAGACAGACAATGGGCCATCTTATTCCAGT | | | |
| | | AAAAACTTTATTTCATTCTGTAAAGAATTCGGTATTAAACATAAAACT | | | |
| | | GGAATTCCTTACAACCCCATGGGACAAGGAATAGTTGAACGTGCTCA | | | |
| | | TCGCACCTTAAAGAATTGGCTCTTTAAGACAAAAGAGGGGCAGCTAT | | | |
| | | ATCCCCCAAGGTCTCCAAAGGCCCACCTTGCCTTCACCTTATTTGTCCT | | | |
| | | AAATTTCTTGCACACCGATATCAAGGGCCAGTCTGCAGCGGATCGCC | | | |
| | | ACTGGCATCCAGTTACTTCTAATTCTTATGCATTGGTAAAATGGAAGG | | | |
| | | ACCCCCTGACTAATGAATGGAAGGGTCCAGATCCAGTTCTAATTTGG | | | |
| | | GGTAGAGGCTCAGTTTGTGTTTTTTCACGAGATGAAGATGGAGCACG | | | |
| | | GTGGCTGCCAGAGAGATTAATTCGTCAGACGAACACAGATTCTGACT | | | |
| | | CTTCTGGTAAGTATCATTCTAAAGACTAAGCGGCCGCAACAGGGGAT | | | |
| | | CCAGACATGATAAGATACATTGATGAGTTTGGACAAACCACAACTAG | | | |
| | | AATGCAGTGAAAAAAATGCTTTATTTGTGAAATTTGTGATGCTATTGC | | | |
| | | TTTATTTGTAACCATTATAAGCTGCAATAAACAAGTTAACAACAACAA | | | |
| | | TTGCATTCATTTTATGTTTCAGGTTCAGGGGGAGGTGTGGGAGGTTTT | | | |
| | | TTCGGATCCTCTAGAGTCGACCTGCAGGCATGCAAGCTTGGCGTAAT | | | |
| | | CATGGTCATAGCTGTTTCCTGTGTGAAATTGTTATCCGCTCACAATTCC | | | |
| | | ACACAACATACGAGCCGGAAGCATAAAGTGTAAAGCCTGGGGTGCC | | | |
| | | TAATGAGTGAGCTAACTCACATTAATTGCGTTGCGCTCACTGCCCGCT | | | |
| | | TTCCAGTCGGGAAACCTGTCGTGCCAGCTGCATTAATGAATCGGCCA | | | |
| | | ACGCGCGGGGAGAGGCGGTTTGCGTATTGGGCGCTCTTCCGCTTCCT | | | |
| | | CGCTCACTGACTCGCTGCGCTCGGTCGTTCGGCTGCGGCGAGCGGTA | | | |
| | | TCAGCTCACTCAAAGGCGGTAATACGGTTATCCACAGAATCAGGGGA | | | |
| | | TAACGCAGGAAAGAACATGTGAGCAAAAGGCCAGCAAAAGGCCAGG | | | |
| | | AACCGTAAAAAGGCCGCGTTGCTGGCGTTTTTCCATAGGCTCCGCCCC | | | |
| | | CCTGACGAGCATCACAAAAATCGACGCTCAAGTCAGAGGTGGCGAA | | | |
| | | ACCCGACAGGACTATAAAGATACCAGGCGTTTCCCCCTGGAAGCTCC | | | |
| | | CTCGTGCGCTCTCCTGTTCCGACCCTGCCGCTTACCGGATACCTGTCC | | | |
| | | GCCTTTCTCCCTTCGGGAAGCGTGGCGCTTTCTCATAGCTCACGCTGT | | | |
| | | AGGTATCTCAGTTCGGTGTAGGTCGTTCGCTCCAAGCTGGGCTGTGT | | | |
| | | GCACGAACCCCCCGTTCAGCCCGACCGCTGCGCCTTATCCGGTAACTA | | | |
| | | TCGTCTTGAGTCCAACCCGGTAAGACACGACTTATCGCCACTGGCAGC | | | |
| | | AGCCACTGGTAACAGGATTAGCAGAGCGAGGTATGTAGGCGGTGCT | | | |
| | | ACAGAGTTCTTGAAGTGGTGGCCTAACTACGGCTACACTAGAAGGAC | | | |
| | | AGTATTTGGTATCTGCGCTCTGCTGAAGCCAGTTACCTTCGGAAAAAG | | | |
| | | AGTTGGTAGCTCTTGATCCGGCAAACAAACCACCGCTGGTAGCGGTG | | | |
| | | GTTTTTTTGTTTGCAAGCAGCAGATTACGCGCAGAAAAAAAGGATCTC | | | |
| | | AAGAAGATCCTTTGATCTTTTCTACGGGGTCTGACGCTCAGTGGAACG | | | |
| | | AAAACTCACGTTAAGGGATTTTGGTCATGAGATTATCAAAAAGGATC | | | |
| | | TTCACCTAGATCCTTTTAAATTAAAAATGAAGTTTTAAATCAATCTAAA | | | |
| | | GTATATATGAGTAAACTTGGTCTGACAGTTACCAATGCTTAATCAGTG | | | |
| | | AGGCACCTATCTCAGCGATCTGTCTATTTCGTTCATCCATAGTTGCCTG | | | |
| | | ACTCCCCGTCGTGTAGATAACTACGATACGGGAGGGCTTACCATCTG | | | |
| | | GCCCCAGTGCTGCAATGATACCGCGAGACCCACGCTCACCGGCTCCA | | | |
| | | GATTTATCAGCAATAAACCAGCCAGCCGGAAGGGCCGAGCGCAGAA | | | |
| | | GTGGTCCTGCAACTTTATCCGCCTCCATCCAGTCTATTAATTGTTGCCG | | | |
| | | GGAAGCTAGAGTAAGTAGTTCGCCAGTTAATAGTTTGCGCAACGTTG | | | |
| | | TTGCCATTGCTACAGGCATCGTGGTGTCACGCTCGTCGTTTGGTATGG | | | |
| | | CTTCATTCAGCTCCGGTTCCCAACGATCAAGGCGAGTTACATGATCCC | | | |
| | | CCATGTTGTGCAAAAAAGCGGTTAGCTCCTTCGGTCCTCCGATCGTTG | | | |
| | | TCAGAAGTAAGTTGGCCGCAGTGTTATCACTCATGGTTATGGCAGCA | | | |
| | | CTGCATAATTCTCTTACTGTCATGCCATCCGTAAGATGCTTTTCTGTGA | | | |
| | | CTGGTGAGTACTCAACCAAGTCATTCTGAGAATAGTGTATGCGGCGA | | | |
| | | CCGAGTTGCTCTTGCCCGGCGTCAATACGGGATAATACCGCGCCACA | | | |
| | | TAGCAGAACTTTAAAAGTGCTCATCATTGGAAAACGTTCTTCGGGGC | | | |
| | | GAAAACTCTCAAGGATCTTACCGCTGTTGAGATCCAGTTCGATGTAAC | | | |
| | | CCACTCGTGCACCCAACTGATCTTCAGCATCTTTTACTTTCACCAGCGT | | | |
| | | TTCTGGGTGAGCAAAAACAGGAAGGCAAAATGCCGCAAAAAAGGGA | | | |
| | | ATAAGGGCGACACGGAAATGTTGAATACTCATACTCTTCCTTTTTCAA | | | |
| | | TATTATTGAAGCATTTATCAGGGTTATTGTCTCATGAGCGGATACATA | | | |
| | | TTTGAATGTATTTAGAAAAATAAACAAATAGGGGTTCCGCGCACATTT | | | |
| | | CCCCGAAAAGTGCCACCTGACGTCTAAGAAACCATTATTATCATGACA | | | |
| | | TTAACCTATAAAAATAGGCGTATCACGAGGCCCTTTCGTCTCGCGCGT | | | |
| | | TTCGGTGATGACGGTGAAAACCTCTGACACATGCAGCTCCCGGAGAC | | | |
| | | GGTCACAGCTTGTCTGTAAGCGGATGCCGGGAGCAGACAAGCCCGTC | | | |
| | | AGGGCGCGTCAGCGGGTGTTGGCGGGTGTCGGGGCTGGCTTAACTA | | | |
| | | TGCGGCATCAGAGCAGATTGTACTGAGAGTGCACCATATGCGGTGTG | | | |
| | | AAATACCGCACAGATGCGTAAGGAGAAAATACCGCATCAGGCGCCAT | | | |
| | | TCGCCATTCAGGCTGCGCAACTGTTGGGAAGGGCGATCGGTGCGGG | | | |
| | | CCTCTTCGCTATTACGCCAGCTGGCGAAAGGGGGATGTGCTGCAAGG | | | |
| | | CGATTAAGTTGGGTAACGCCAGGGTTTTCCCAGTCACGACGTTGTAA | | | |
| | | AACGACGGCCAGT | | | |
| DRIVER_ | PLV10046 | GAATTCGAGCTTGCATGCCTGCAGGTCGTTACATAACTTACGGTAAAT | 314 | N/A | |
| pCMV_R- | | GGCCCGCCTGGCTGACCGCCCAACGACCCCCGCCCATTGACGTCAAT | | | |
| U5- | | AATGACGTATGTTCCCATAGTAACGCCAATAGGGACTTTCCATTGACG | | | |
| MusD6- | | TCAATGGGTGGAGTATTTACGGTAAACTGCCCACTTGGCAGTACATC | | | |
| LTR_v1 | | AAGTGTATCATATGCCAAGTACGCCCCCTATTGACGTCAATGACGGTA | | | |
| | | AATGGCCCGCCTGGCATTATGCCCAGTACATGACCTTATGGGACTTTC | | | |
| | | CTACTTGGCAGTACATCTACGTATTAGTCATCGCTATTACCATGGTGA | | | |
| | | TGCGGTTTTGGCAGTACATCAATGGGCGTGGATAGCGGTTTGACTCA | | | |
| | | CGGGGATTTCCAAGTCTCCACCCCATTGACGTCAATGGGAGTTTGTTT | | | |
| | | TGGCACCAAAATCAACGGGACTTTCCAAAATGTCGTAACAACTCCGCC | | | |
| | | CCATTGACGCAAATGGGCGGTAGGCGTGTACGGTGGGAGGTCTATA | | | |
| | | TAAGCAGAGCTCGTTTAGTGAACCGTCAGAGCTTTGATCAGAATGAA | | | |
| | | TTTGTCTTGGCTCCGTTTCTTCTTTCGCCCCGTCTAGATTCCTCTCTTAC | | | |
| | | AGCTCGAGTGGCCTTCTCAGTCGAACCGTTCACGTTGCGAGCTGCTG | | | |
| | | GCGGCCGCAACATTTTGGCGCCAGAACTGGGACCTGAAGAATGGCA | | | |
| | | GAGAGATGCTAAGAGGAACGCTGCTTTGGAGCTCCACAGGAAAGGA | | | |
| | | TCTTCGTATCGGACATCGGAGCAACGGACAGGTACACATGCTAGCGC | | | |
| | | TAGCTTAAAATTTCAGTTTTGTAAAGTGTTGCTGAGGATGTGGTAGG | | | |
| | | ATACGAATTAAGCTTGAATCAGTGCTAACCCAACGCTGGTTCTGCTTG | | | |
| | | GGTCAGCAGCGTGTTAATCGGAACTAGAAACGGAAACAGGCAGGTT | | | |
| | | AGCCGCAGCTTTTTAGGAAGCTGCTTAGGTGGAAGAAGAAAGGGTTT | | | |
| | | AAAGTCATGGATCAGGCGGTTGCCCATAGTTTTCAGGAGTTGTTTCA | | | |
| | | GGCCAGAGGAGTAAGGCTTGAAGTACAATTAGTAAAAAATTTTTTAG | | | |
| | | GTAAGATAGATAGCTGTTGCCCATGGTTCAAGGAAGAAGAAACACTA | | | |
| | | GATTGTGGAACCTGGGAGAAAGTTGGTGAGGCCTTAAAAATCACTCA | | | |
| | | GGCAGATAATTTTACCCTAGGCCTCTGGGCACTCATAAATGATGCAAT | | | |
| | | AAAAGATGCCACTTCCCCAGGGCTAAGTTGCCCCCAGGCGGAGCTTG | | | |
| | | TGGTATCTCAGGAGGAGTGCCTGTCAGAGAGGGCCTCCTCAGAAAAA | | | |
| | | GATCTTCTTAACTCAAAAATTGATAAATGTGGAAACTCGGATGAAAA | | | |
| | | ACTGATTTTTAACAAAAATCACTCAGATAGAGGAGCTGCCCATTACCT | | | |
| | | TAATGAGAATTGGTCCTCTTGTGAATCTCCTGCTCAACCTGTAGTCCC | | | |
| | | CACTTCGGGAGGTGCCACTCATAGGGACACACGACTAAGCGAGTTAG | | | |
| | | AGTTTGAGATTAAGCTTCAGAGGCTGACTAATGAGCTTCGGGAACTA | | | |
| | | AAAAAGATGTCAGAAGCGGAGAAGAGTAACTCTTCTGTAGTTCACCA | | | |
| | | GGTGCCGCTAGAAAAGGTTGTGAGTCAGGCTCATGGGAAAGGACAG | | | |
| | | AATATCTCTAATACGCTAGCCTTTCCTGTGGTTGAGGTAGTTGATCAG | | | |
| | | CAAGATACTAGGGGCAGACATTACCAGACCTTAGATTTCAAGTTGAT | | | |
| | | AAAAGAGTTAAAGGCGGCTGTTGTGCAATATGGCCCTTCAGCCCCAT | | | |
| | | TCACTCAAGCATTACTGGACACAGTTGTGGAGTCACACTTAACCCCTT | | | |
| | | TAGATTGGAAGACTCTTTCTAAGGCTACCCTGTCAGGAGGAGATTTTT | | | |
| | | TGCTTTGGGATTCTGAATGGCGAGACGCCAGTAAGAAAACTGCTGCT | | | |
| | | TCTAACGCTCAGGCTGGTAATTCAGACTGGGATAGCAACATGCTTTTA | | | |
| | | GGAGAGGGCCCTTATGAGGGACAGACAAATCAGATTGATTTTCCCGT | | | |
| | | TGCAGTGTACGCGCAAATTGCGACGGCCGCACGCCGTGCTTGGGGA | | | |
| | | AGGTTGCCAGTCAAAGGAGAGATTGGTGGAAGTTTAGCTAGCATTCG | | | |
| | | GCAGAGTTCTGATGAACCATATCAGGATTTTGTGGACAGGCTATTGA | | | |
| | | TTTCAGCTAGTAGAATCCTTGGAAATCCGGACACGGGAAGTCCTTTCG | | | |
| | | TTATGCAATTGGCTTATGAGAATGCTAACGCAATTTGCCGAGCTGCGA | | | |
| | | TTCAACCGCATAAGGGAACGACAGATTTGGCGGGATATGTCCGTCTT | | | |
| | | TGCGCAGACATCGGGCCTTCCTGCGAGACCTTGCAGGGAACCCACGC | | | |
| | | GCAGGCAATGTTCTCTAGGAAACGAGGGAATAGTGCATGCTTTAAAT | | | |
| | | GTGGAAGTTTAGATCATTTTAGAATTGATTGTCCTCAGAACAAGGGC | | | |
| | | GCCGAGGTTAGACAAACAGGCCGTGCCCCGGGAATATGTCCCCGATG | | | |
| | | TGGAAAGGGCCGCCACTGGGCGAAAGATTGCAAGCATAAAACGAGG | | | |
| | | GTTTTGAGCCGCCCGGTGCCGGGAAACGAGGAAAGGGGTCAGCCCC | | | |
| | | AGGCCCCAAGTTACTCAAAGAAGACAGCTTATGGGGCTCTAAATCTG | | | |
| | | CTGCCCAGCCAACAAGATCAGTTCTTGAGCTTGTCAGGTCAAACCCAG | | | |
| | | GAAACGCAAGACTGGACCTCTGTTCCACTGTCCATGCAGCATTAACCC | | | |
| | | CAGAAGTGGGAGTCCAAACTCTGCCTACCGGAGTCTTTGGACCACTA | | | |
| | | CCTGTAGGAACCTGTGGTTTTCTCTTAGGACGAAGCAGTTCTATTGTA | | | |
| | | GAAGGCCTGCAGATTTATCCAGGTGTTATAAGTAATGATTATGAGGG | | | |
| | | AGAAATTAAAATCATAGCCGCTTGCCCTCGTGGTGCTATAACTATACC | | | |
| | | CGCTAATCAGAAAATTGCTCAACTTACCTTGATCCCCTTGCGCTGGTC | | | |
| | | ACTATCTAAATTCTCTAAAAATGAAGAAGGACAGATTAACTTTGACTC | | | |
| | | CTCTGGCGTAAATTGGGTGAAATCTATCACTAATCAGAGACCTAACCT | | | |
| | | TAAATTGATTCTTGATGGAAAAAGCTTTGAAGGATTAATAGATACCG | | | |
| | | GGGCCGATGTAACCATTATTAGAGGGCAGGACTGGCCCTCAAACTGG | | | |
| | | CCCCTGTCTGTTTCCTTGACTCACCTTCAAGGAATTGGTTATGCCAGTA | | | |
| | | ACCCAAAACGTAGTTCCAAATTGCTAACCTGGAGAGATGAGGATGGA | | | |
| | | AAATCAGGAAATATTCAGCCGTATGTTATGCAAAATTTGCCTGTAACC | | | |
| | | CTGTGGGGAAGAGATCTGTTGTCACAGATGGGCGTTATCCTGTGCAG | | | |
| | | TTCTAAGGAAATGGTGACTGAACAGACGTTCAGGCAGGGACCCCTGC | | | |
| | | CTGATCGTGGACTAATAAAGAAGGGACAGAAAATTAAGACTTTTGAA | | | |
| | | GATCTTAAACCCCACTCTAACGTGAGAGGTTTAAAGTATTTTCAGTAG | | | |
| | | TGGCCGCTGTCTTGCCTGCATCCCACGCCGAAAAAATTCAATGGCGTA | | | |
| | | ATGATATTCCGGTGTGGGTAGATCAGTGGTCTTTACCTAAAGAGAAA | | | |
| | | ATAGAGGCCGCTTCTCTGCTAGTGCAGGAGCAGTTAGAAGCAGGACA | | | |
| | | TTTGGTGGAGTCTCATTCTCCCTGGAATACACCCATTTTCATTATCAGG | | | |
| | | AAGAAATCGGGAAAATGGAGACTGTTGCAAGATTTAAGAAAGGTTA | | | |
| | | ATGAAACCATGGTACTTATGGGAACTTTACAACCGGGGCTCCCCTCCC | | | |
| | | CAGTAGCCATTCCTAAGGGATACTATAAGATTGTTATAGATTTGAAAG | | | |
| | | ATTGTTTCTTTACCATCCCTTTGCATCCAGAGGATTGTGAGAGATTTGC | | | |
| | | TTTTAGTGTTCCTTCTGTAAATTTCAAGGAACCCATGAAAAGATATCA | | | |
| | | ATGGACAGTTCTCCCGCAGGGGATGGCTAATAGTCCCACCTTATGTCA | | | |
| | | AAAGTTTGTGGCAAAGGCAATTCAGCCTGTTAGACAACAATGGCCAA | | | |
| | | ATATTTACATCATTCATTTCACAGATGATGTTTTGATGGCGGGAAAGG | | | |
| | | ACCCCCAAGATTTGCTTTTGTGTTATGGAGACTTACGAAAGGCCCTGG | | | |
| | | CTGATAAGGGATTACAAATTGCTTCTGAAAAGATACAAACTCAGGAT | | | |
| | | CCTTATAATTATTTGGGTTTTAGACTCACTGACCAAGCTGTTTTTCACC | | | |
| | | AGAAAATTGTTATTCGTAGAGATAACTTAAGGACCTTAAATGATTTTC | | | |
| | | AAAAATTGTTAGGTGATATAAACTGGCTTCGCCCCTATCTAAAGCTTA | | | |
| | | CTACAGGGGAGTTGAAACCTTTATTTGATATTCTTAAAGGGAGTTCTG | | | |
| | | ATCCTACTTCCCCTAGATCCCTAACCTCAGAAGGTTTACTGGCCTTACA | | | |
| | | GCTAGTGGAAAAGGCTATTGAAGAACAGTTTGTCACTTACATAGATT | | | |
| | | ACTCCCTGCCGCTGCACCTGTTAATTTTTAACACGACTCATGTGCCTAC | | | |
| | | GGGATTGCTATGGCAAAAATTTCCTATAATGTGGATACATTCAAGGAT | | | |
| | | TTCTCCCAAACGTAATATTTTGCCATATCATGAAGCAGTGGCTCAGAT | | | |
| | | GATTATCACTGGAAGAAGGCAGGCATTGACTTATTTTGGAAAGGAGC | | | |
| | | CAGATATCATTGTCCAGCCTTACAGCGTGAGTCAGGACACTTGGCTG | | | |
| | | AAACAGCATAGTACAGATTGGTTGCTTGCACAATTAGGGTTTGAAGG | | | |
| | | AACTATAGATAGCCACTACCCCCAAGATAGGTTGATAAAATTCTTAAA | | | |
| | | TGTACATGATATGATATTTCCTAAGATGACTTCCTTACAGCCTTTAAAT | | | |
| | | AATGCTCTATTGATTTTTACTGATGGCTCCTCTAAAGGGCGAGCTGGA | | | |
| | | TATCTTATTAGTAATCAACAGGTTATCGTAGAGACTCCTGGTCTCTCG | | | |
| | | GCTCAGCTCGCCGAACTAACAGCAGTACTGAAGGTTTTTCAGTCTGTA | | | |
| | | CAGGAGGCTTTTAATATTTTTACTGACAGTTTATATGTTGCTCAGTCA | | | |
| | | GTACCCTTATTGGAAACCTGTGGTACTTTTAACTTCAATACGCCGTCA | | | |
| | | GGATCTTTATTTTCAGAATTACAAAACATCATTCTCGCCCGGAAAAAT | | | |
| | | CCGTTTTATATTGGCCACATACGGTCTCACTCTGGTCTTCCTGGACCTC | | | |
| | | TGGCAGAGGGTAATAATTGCATTGACAGAGCTCTAATAGGAGAAGCC | | | |
| | | TTAGTTTCAGATCGGGTTGCTTTGGCCCAACGTGATCATGAAAGGTTT | | | |
| | | CATCTCTCTAGCCATACCCTAAGGCTCCGACATAAGATCACCAAGGAG | | | |
| | | CAAGCGAGAATGATTGTAAAACAATGTCCTAAATGTATTACTTTATCT | | | |
| | | CCAGTGCCGCATCTAGGAGTTAATCCTAGAGGCCTTATGCCTAATCAT | | | |
| | | ATTTGGCAAATGGATATAACCCATTATGCAGAATTTGGAAAACTAAA | | | |
| | | ATATATACATGTTTGCATTGATACTTGTTCAGGATTTCTCTTTGCTTCTC | | | |
| | | TGCATACAGGAGAAGCTTCAAAAAACGTAATTGATCATTGCCTACAA | | | |
| | | GCATTTAATGCCATGGGATTACCTAAACTTATTAAGACAGACAATGG | | | |
| | | GCCATCTTATTCCAGTAAAAACTTTATTTCATTCTGTAAAGAATTCGGT | | | |
| | | ATTAAACATAAAACTGGAATTCCTTACAACCCCATGGGACAAGGAAT | | | |
| | | AGTTGAACGTGCTCATCGCACCTTAAAGAATTGGCTCTTTAAGACAAA | | | |
| | | AGAGGGGCAGCTATATCCCCCAAGGTCTCCAAAGGCCCACCTTGCCT | | | |
| | | TCACCTTATTTGTCCTAAATTTCTTGCACACCGATATCAAGGGCCAGTC | | | |
| | | TGCAGCGGATCGCCACTGGCATCCAGTTACTTCTAATTCTTATGCATT | | | |
| | | GGTAAAATGGAAGGACCCCCTGACTAATGAATGGAAGGGTCCAGAT | | | |
| | | CCAGTTCTAATTTGGGGTAGAGGCTCAGTTTGTGTTTTTTCACGAGAT | | | |
| | | GAAGATGGAGCACGGTGGCTGCCAGAGAGATTAATTCGTCAGACGA | | | |
| | | ACACAGATTCTGACTCTTCTGGTAAGTATCATTCTAAAGACTAAAATT | | | |
| | | CCTTTTGTGCTTAAAATTCAGCTGAGAGCAACAGCTCTCAAAGCTGTT | | | |
| | | CTCCAGCTACTCTCTGAGCCAGCTCCCGACAGGAGGCCGGAGACTAG | | | |
| | | CCTCAGCTTTACAATTTGCATTTAAATAAAGTACCTAGACTTCCCCGAA | | | |
| | | AAAAGTTCTGCTTTTCTACTTTCTCACTGTCTTTCAAGATTTTGTCTTTC | | | |
| | | AAGCAGGTAAATCAACATTCTCGAGGCGGACCAGCGGATGTGCATCC | | | |
| | | CCGCCCCCCTAGAGCACTCAGGTGGCAGCTGTTATCCCCAGTCTCAGG | | | |
| | | ACATTCCAGCATGTGGCCTTCAGTCTGAGTTAAAAATTAGGTTTACCC | | | |
| | | AGAGGACTAGAATAGTAGATATTTCTATATTAATAAAGATTGGTTTTT | | | |
| | | ATTTTGATAGACAGGCTTAGCCCCTTAGCTGACCTCTGGCTTTTCACCC | | | |
| | | TTGCTGTTACTGCAAGGTGTCTTTAGCTCAATAAGGCTGTGGAAAAAA | | | |
| | | ACAGGGATGAGGAGGAACGGCTCCCAGCTCCTATTTTAGCCACAAAT | | | |
| | | CGTGGTGTTACTAACGACATAATTCTTGCTTAGGCTTTGCTAAATCTG | | | |
| | | AGGTTGATAATTCTCCTTTAGGAGCTGCACAGCGCTCAGAACTGTGCA | | | |
| | | TACTGATTTGTGATGGTACAAATTCAGTATGGGCATCGCTTGGTGCA | | | |
| | | GATGGAGGTACTGCAAGGAAAGGTCCCAGCTTGACCATTTCTGAGTT | | | |
| | | TCCTGTGAGATAAACCCGGTTTGAAAGAGGTTGGTACCAAATTATAT | | | |
| | | ATCCCTCGGCTCTACCTCGCCTCCCCAAAAGGTACCAGAGCCACAGGT | | | |
| | | GTGGATTTTAACAGAATCCACGGGAGGAATCGGGTCCATGTCCACCC | | | |
| | | AAGCCAAGGTTAAAAGCCCACTCATCTACGGATGAGAAAATCATTTG | | | |
| | | ATCACCTCAGTTAAGCGCTGCCTTATTTTAACTTAATTAATAGGGGGG | | | |
| | | AGAGAGATTGGAGACTTACTATTGAAAGGGCAAGCCCTTCACTGCCT | | | |
| | | CCCACCCAAATAAAAAAGCCAATTGGCCTTGTACTACAGAGCTGGCC | | | |
| | | GGACCCCTTATCCCTGTTACCCACCAATCATCCAAAAATGCGGAGGAA | | | |
| | | TATCAACTTAGTGTTATTCTTATTATAGTGTATTTCACACTTGTTCAGTC | | | |
| | | AAACTTAGCCAGAGTTCCAACGCCCTACTTAAAATTCAACTAGAAAGT | | | |
| | | TACCTACCAAGTACTAATTAGCATTATAAAGTCAGAGCCTACAGCTCC | | | |
| | | AGGCTTTTCAGTTAGTTGTTTACTAAGATAAGAAAAGACAGTCTTAGC | | | |
| | | CAGATACAGTTTACCATAATAAAAGTTAAAGAATCCCAGGGAAGCAA | | | |
| | | GTTTTTTCTTTTAGCCCTAGATTCCAGGCAGAACTATTGAGCATAGAT | | | |
| | | AATTTTTCCCCCTCAGGCCAGCTTTTTCTTTTTTTTTAATTTTGTTAATA | | | |
| | | AAAGGGAGGAGATGTAGTCTCCCCTCCCCCAGCCTGAAACCTGCTTG | | | |
| | | CTCAGGGGTGGAGCTTCCCGCTCATCGCTCTGCCACGCCCACTGCTG | | | |
| | | GAACCTGCGGAGCCACACACGTGCACCTTTCTACTGGACCAGAGATT | | | |
| | | ATTCGGCGGGAATCGGGTCCCCTCCCCCTTCCTTCATAACTAGTGTCC | | | |
| | | CAACAATAAAATTTGAGCTTTGATCAGAATGAATTTGTCTTGGCTCCG | | | |
| | | TTTCTTCTTTCGCCCCGTCTAGATTCCTCTCTTACAGCTCGAGTGGCCT | | | |
| | | TCTCAGTCGAACCGTTCACGTTGCGAGCTGCTGGCGGCCGCAACAGG | | | |
| | | GGATCCAGACATGATAAGATACATTGATGAGTTTGGACAAACCACAA | | | |
| | | CTAGAATGCAGTGAAAAAAATGCTTTATTTGTGAAATTTGTGATGCTA | | | |
| | | TTGCTTTATTTGTAACCATTATAAGCTGCAATAAACAAGTTAACAACA | | | |
| | | ACAATTGCATTCATTTTATGTTTCAGGTTCAGGGGGAGGTGTGGGAG | | | |
| | | GTTTTTTCGGATCCTCTAGAGTCGACCTGCAGGCATGCAAGCTTGGCG | | | |
| | | TAATCATGGTCATAGCTGTTTCCTGTGTGAAATTGTTATCCGCTCACAA | | | |
| | | TTCCACACAACATACGAGCCGGAAGCATAAAGTGTAAAGCCTGGGGT | | | |
| | | GCCTAATGAGTGAGCTAACTCACATTAATTGCGTTGCGCTCACTGCCC | | | |
| | | GCTTTCCAGTCGGGAAACCTGTCGTGCCAGCTGCATTAATGAATCGG | | | |
| | | CCAACGCGCGGGGAGAGGCGGTTTGCGTATTGGGCGCTCTTCCGCTT | | | |
| | | CCTCGCTCACTGACTCGCTGCGCTCGGTCGTTCGGCTGCGGCGAGCG | | | |
| | | GTATCAGCTCACTCAAAGGCGGTAATACGGTTATCCACAGAATCAGG | | | |
| | | GGATAACGCAGGAAAGAACATGTGAGCAAAAGGCCAGCAAAAGGCC | | | |
| | | AGGAACCGTAAAAAGGCCGCGTTGCTGGCGTTTTTCCATAGGCTCCG | | | |
| | | CCCCCCTGACGAGCATCACAAAAATCGACGCTCAAGTCAGAGGTGGC | | | |
| | | GAAACCCGACAGGACTATAAAGATACCAGGCGTTTCCCCCTGGAAGC | | | |
| | | TCCCTCGTGCGCTCTCCTGTTCCGACCCTGCCGCTTACCGGATACCTGT | | | |
| | | CCGCCTTTCTCCCTTCGGGAAGCGTGGCGCTTTCTCATAGCTCACGCT | | | |
| | | GTAGGTATCTCAGTTCGGTGTAGGTCGTTCGCTCCAAGCTGGGCTGT | | | |
| | | GTGCACGAACCCCCCGTTCAGCCCGACCGCTGCGCCTTATCCGGTAAC | | | |
| | | TATCGTCTTGAGTCCAACCCGGTAAGACACGACTTATCGCCACTGGCA | | | |
| | | GCAGCCACTGGTAACAGGATTAGCAGAGCGAGGTATGTAGGCGGTG | | | |
| | | CTACAGAGTTCTTGAAGTGGTGGCCTAACTACGGCTACACTAGAAGG | | | |
| | | ACAGTATTTGGTATCTGCGCTCTGCTGAAGCCAGTTACCTTCGGAAAA | | | |
| | | AGAGTTGGTAGCTCTTGATCCGGCAAACAAACCACCGCTGGTAGCGG | | | |
| | | TGGTTTTTTTGTTTGCAAGCAGCAGATTACGCGCAGAAAAAAAGGAT | | | |
| | | CTCAAGAAGATCCTTTGATCTTTTCTACGGGGTCTGACGCTCAGTGGA | | | |
| | | ACGAAAACTCACGTTAAGGGATTTTGGTCATGAGATTATCAAAAAGG | | | |
| | | ATCTTCACCTAGATCCTTTTAAATTAAAAATGAAGTTTTAAATCAATCT | | | |
| | | AAAGTATATATGAGTAAACTTGGTCTGACAGTTACCAATGCTTAATCA | | | |
| | | GTGAGGCACCTATCTCAGCGATCTGTCTATTTCGTTCATCCATAGTTG | | | |
| | | CCTGACTCCCCGTCGTGTAGATAACTACGATACGGGAGGGCTTACCA | | | |
| | | TCTGGCCCCAGTGCTGCAATGATACCGCGAGACCCACGCTCACCGGC | | | |
| | | TCCAGATTTATCAGCAATAAACCAGCCAGCCGGAAGGGCCGAGCGCA | | | |
| | | GAAGTGGTCCTGCAACTTTATCCGCCTCCATCCAGTCTATTAATTGTTG | | | |
| | | CCGGGAAGCTAGAGTAAGTAGTTCGCCAGTTAATAGTTTGCGCAACG | | | |
| | | TTGTTGCCATTGCTACAGGCATCGTGGTGTCACGCTCGTCGTTTGGTA | | | |
| | | TGGCTTCATTCAGCTCCGGTTCCCAACGATCAAGGCGAGTTACATGAT | | | |
| | | CCCCCATGTTGTGCAAAAAAGCGGTTAGCTCCTTCGGTCCTCCGATCG | | | |
| | | TTGTCAGAAGTAAGTTGGCCGCAGTGTTATCACTCATGGTTATGGCA | | | |
| | | GCACTGCATAATTCTCTTACTGTCATGCCATCCGTAAGATGCTTTTCTG | | | |
| | | TGACTGGTGAGTACTCAACCAAGTCATTCTGAGAATAGTGTATGCGG | | | |
| | | CGACCGAGTTGCTCTTGCCCGGCGTCAATACGGGATAATACCGCGCC | | | |
| | | ACATAGCAGAACTTTAAAAGTGCTCATCATTGGAAAACGTTCTTCGGG | | | |
| | | GCGAAAACTCTCAAGGATCTTACCGCTGTTGAGATCCAGTTCGATGTA | | | |
| | | ACCCACTCGTGCACCCAACTGATCTTCAGCATCTTTTACTTTCACCAGC | | | |
| | | GTTTCTGGGTGAGCAAAAACAGGAAGGCAAAATGCCGCAAAAAAGG | | | |
| | | GAATAAGGGCGACACGGAAATGTTGAATACTCATACTCTTCCTTTTTC | | | |
| | | AATATTATTGAAGCATTTATCAGGGTTATTGTCTCATGAGCGGATACA | | | |
| | | TATTTGAATGTATTTAGAAAAATAAACAAATAGGGGTTCCGCGCACAT | | | |
| | | TTCCCCGAAAAGTGCCACCTGACGTCTAAGAAACCATTATTATCATGA | | | |
| | | CATTAACCTATAAAAATAGGCGTATCACGAGGCCCTTTCGTCTCGCGC | | | |
| | | GTTTCGGTGATGACGGTGAAAACCTCTGACACATGCAGCTCCCGGAG | | | |
| | | ACGGTCACAGCTTGTCTGTAAGCGGATGCCGGGAGCAGACAAGCCC | | | |
| | | GTCAGGGCGCGTCAGCGGGTGTTGGCGGGTGTCGGGGCTGGCTTAA | | | |
| | | CTATGCGGCATCAGAGCAGATTGTACTGAGAGTGCACCATATGCGGT | | | |
| | | GTGAAATACCGCACAGATGCGTAAGGAGAAAATACCGCATCAGGCG | | | |
| | | CCATTCGCCATTCAGGCTGCGCAACTGTTGGGAAGGGCGATCGGTGC | | | |
| | | GGGCCTCTTCGCTATTACGCCAGCTGGCGAAAGGGGGATGTGCTGCA | | | |
| | | AGGCGATTAAGTTGGGTAACGCCAGGGTTTTCCCAGTCACGACGTTG | | | |
| | | TAAAACGACGGCCAGT | | | |
| DRIVER_ | PLV10047 | GAATTCGAGCTTGCATGCCTGCAGGTCGTTACATAACTTACGGTAAAT | 315 | N/A | |
| pCMV_R- | | GGCCCGCCTGGCTGACCGCCCAACGACCCCCGCCCATTGACGTCAAT | | | |
| U5- | | AATGACGTATGTTCCCATAGTAACGCCAATAGGGACTTTCCATTGACG | | | |
| MusD6- | | TCAATGGGTGGAGTATTTACGGTAAACTGCCCACTTGGCAGTACATC | | | |
| LTR_v2 | | AAGTGTATCATATGCCAAGTACGCCCCCTATTGACGTCAATGACGGTA | | | |
| | | AATGGCCCGCCTGGCATTATGCCCAGTACATGACCTTATGGGACTTTC | | | |
| | | CTACTTGGCAGTACATCTACGTATTAGTCATCGCTATTACCATGGTGA | | | |
| | | TGCGGTTTTGGCAGTACATCAATGGGCGTGGATAGCGGTTTGACTCA | | | |
| | | CGGGGATTTCCAAGTCTCCACCCCATTGACGTCAATGGGAGTTTGTTT | | | |
| | | TGGCACCAAAATCAACGGGACTTTCCAAAATGTCGTAACAACTCCGCC | | | |
| | | CCATTGACGCAAATGGGCGGTAGGCGTGTACGGTGGGAGGTCTATA | | | |
| | | TAAGCAGAGCTCGTTTAGTGAACCGTCAGCTTTGATCAGAATGAATTT | | | |
| | | GTCTTGGCTCCGTTTCTTCTTTCGCCCCGTCTAGATTCCTCTCTTACAGC | | | |
| | | TCGAGTGGCCTTCTCAGTCGAACCGTTCACGTTGCGAGCTGCTGGCG | | | |
| | | GCCGCAACATTTTGGCGCCAGAACTGGGACCTGAAGAATGGCAGAG | | | |
| | | AGATGCTAAGAGGAACGCTGCTTTGGAGCTCCACAGGAAAGGATCTT | | | |
| | | CGTATCGGACATCGGAGCAACGGACAGGTACACATGCTAGCGCTAGC | | | |
| | | TTAAAATTTCAGTTTTGTAAAGTGTTGCTGAGGATGTGGTAGGATAC | | | |
| | | GAATTAAGCTTGAATCAGTGCTAACCCAACGCTGGTTCTGCTTGGGTC | | | |
| | | AGCAGCGTGTTAATCGGAACTAGAAACGGAAACAGGCAGGTTAGCC | | | |
| | | GCAGCTTTTTAGGAAGCTGCTTAGGTGGAAGAAGAAAGGGTTTAAA | | | |
| | | GTCATGGATCAGGCGGTTGCCCATAGTTTTCAGGAGTTGTTTCAGGC | | | |
| | | CAGAGGAGTAAGGCTTGAAGTACAATTAGTAAAAAATTTTTTAGGTA | | | |
| | | AGATAGATAGCTGTTGCCCATGGTTCAAGGAAGAAGAAACACTAGAT | | | |
| | | TGTGGAACCTGGGAGAAAGTTGGTGAGGCCTTAAAAATCACTCAGGC | | | |
| | | AGATAATTTTACCCTAGGCCTCTGGGCACTCATAAATGATGCAATAAA | | | |
| | | AGATGCCACTTCCCCAGGGCTAAGTTGCCCCCAGGCGGAGCTTGTGG | | | |
| | | TATCTCAGGAGGAGTGCCTGTCAGAGAGGGCCTCCTCAGAAAAAGAT | | | |
| | | CTTCTTAACTCAAAAATTGATAAATGTGGAAACTCGGATGAAAAACTG | | | |
| | | ATTTTTAACAAAAATCACTCAGATAGAGGAGCTGCCCATTACCTTAAT | | | |
| | | GAGAATTGGTCCTCTTGTGAATCTCCTGCTCAACCTGTAGTCCCCACTT | | | |
| | | CGGGAGGTGCCACTCATAGGGACACACGACTAAGCGAGTTAGAGTTT | | | |
| | | GAGATTAAGCTTCAGAGGCTGACTAATGAGCTTCGGGAACTAAAAAA | | | |
| | | GATGTCAGAAGCGGAGAAGAGTAACTCTTCTGTAGTTCACCAGGTGC | | | |
| | | CGCTAGAAAAGGTTGTGAGTCAGGCTCATGGGAAAGGACAGAATAT | | | |
| | | CTCTAATACGCTAGCCTTTCCTGTGGTTGAGGTAGTTGATCAGCAAGA | | | |
| | | TACTAGGGGCAGACATTACCAGACCTTAGATTTCAAGTTGATAAAAG | | | |
| | | AGTTAAAGGCGGCTGTTGTGCAATATGGCCCTTCAGCCCCATTCACTC | | | |
| | | AAGCATTACTGGACACAGTTGTGGAGTCACACTTAACCCCTTTAGATT | | | |
| | | GGAAGACTCTTTCTAAGGCTACCCTGTCAGGAGGAGATTTTTTGCTTT | | | |
| | | GGGATTCTGAATGGCGAGACGCCAGTAAGAAAACTGCTGCTTCTAAC | | | |
| | | GCTCAGGCTGGTAATTCAGACTGGGATAGCAACATGCTTTTAGGAGA | | | |
| | | GGGCCCTTATGAGGGACAGACAAATCAGATTGATTTTCCCGTTGCAG | | | |
| | | TGTACGCGCAAATTGCGACGGCCGCACGCCGTGCTTGGGGAAGGTT | | | |
| | | GCCAGTCAAAGGAGAGATTGGTGGAAGTTTAGCTAGCATTCGGCAG | | | |
| | | AGTTCTGATGAACCATATCAGGATTTTGTGGACAGGCTATTGATTTCA | | | |
| | | GCTAGTAGAATCCTTGGAAATCCGGACACGGGAAGTCCTTTCGTTAT | | | |
| | | GCAATTGGCTTATGAGAATGCTAACGCAATTTGCCGAGCTGCGATTC | | | |
| | | AACCGCATAAGGGAACGACAGATTTGGGGGATATGTCCGTCTTTGC | | | |
| | | GCAGACATCGGGCCTTCCTGCGAGACCTTGCAGGGAACCCACGCGCA | | | |
| | | GGCAATGTTCTCTAGGAAACGAGGGAATAGTGCATGCTTTAAATGTG | | | |
| | | GAAGTTTAGATCATTTTAGAATTGATTGTCCTCAGAACAAGGGCGCC | | | |
| | | GAGGTTAGACAAACAGGCCGTGCCCCGGGAATATGTCCCCGATGTG | | | |
| | | GAAAGGGCCGCCACTGGGCGAAAGATTGCAAGCATAAAACGAGGGT | | | |
| | | TTTGAGCCGCCCGGTGCCGGGAAACGAGGAAAGGGGTCAGCCCCAG | | | |
| | | GCCCCAAGTTACTCAAAGAAGACAGCTTATGGGGCTCTAAATCTGCT | | | |
| | | GCCCAGCCAACAAGATCAGTTCTTGAGCTTGTCAGGTCAAACCCAGG | | | |
| | | AAACGCAAGACTGGACCTCTGTTCCACTGTCCATGCAGCATTAACCCC | | | |
| | | AGAAGTGGGAGTCCAAACTCTGCCTACCGGAGTCTTTGGACCACTAC | | | |
| | | CTGTAGGAACCTGTGGTTTTCTCTTAGGACGAAGCAGTTCTATTGTAG | | | |
| | | AAGGCCTGCAGATTTATCCAGGTGTTATAAGTAATGATTATGAGGGA | | | |
| | | GAAATTAAAATCATAGCCGCTTGCCCTCGTGGTGCTATAACTATACCC | | | |
| | | GCTAATCAGAAAATTGCTCAACTTACCTTGATCCCCTTGCGCTGGTCA | | | |
| | | CTATCTAAATTCTCTAAAAATGAAGAAGGACAGATTAACTTTGACTCC | | | |
| | | TCTGGCGTAAATTGGGTGAAATCTATCACTAATCAGAGACCTAACCTT | | | |
| | | AAATTGATTCTTGATGGAAAAAGCTTTGAAGGATTAATAGATACCGG | | | |
| | | GGCCGATGTAACCATTATTAGAGGGCAGGACTGGCCCTCAAACTGGC | | | |
| | | CCCTGTCTGTTTCCTTGACTCACCTTCAAGGAATTGGTTATGCCAGTAA | | | |
| | | CCCAAAACGTAGTTCCAAATTGCTAACCTGGAGAGATGAGGATGGAA | | | |
| | | AATCAGGAAATATTCAGCCGTATGTTATGCAAAATTTGCCTGTAACCC | | | |
| | | TGTGGGGAAGAGATCTGTTGTCACAGATGGGCGTTATCCTGTGCAGT | | | |
| | | TCTAAGGAAATGGTGACTGAACAGACGTTCAGGCAGGGACCCCTGCC | | | |
| | | TGATCGTGGACTAATAAAGAAGGGACAGAAAATTAAGACTTTTGAAG | | | |
| | | ATCTTAAACCCCACTCTAACGTGAGAGGTTTAAAGTATTTTCAGTAGT | | | |
| | | GGCCGCTGTCTTGCCTGCATCCCACGCCGAAAAAATTCAATGGCGTA | | | |
| | | ATGATATTCCGGTGTGGGTAGATCAGTGGTCTTTACCTAAAGAGAAA | | | |
| | | ATAGAGGCCGCTTCTCTGCTAGTGCAGGAGCAGTTAGAAGCAGGACA | | | |
| | | TTTGGTGGAGTCTCATTCTCCCTGGAATACACCCATTTTCATTATCAGG | | | |
| | | AAGAAATCGGGAAAATGGAGACTGTTGCAAGATTTAAGAAAGGTTA | | | |
| | | ATGAAACCATGGTACTTATGGGAACTTTACAACCGGGGCTCCCCTCCC | | | |
| | | CAGTAGCCATTCCTAAGGGATACTATAAGATTGTTATAGATTTGAAAG | | | |
| | | ATTGTTTCTTTACCATCCCTTTGCATCCAGAGGATTGTGAGAGATTTGC | | | |
| | | TTTTAGTGTTCCTTCTGTAAATTTCAAGGAACCCATGAAAAGATATCA | | | |
| | | ATGGACAGTTCTCCCGCAGGGGATGGCTAATAGTCCCACCTTATGTCA | | | |
| | | AAAGTTTGTGGCAAAGGCAATTCAGCCTGTTAGACAACAATGGCCAA | | | |
| | | ATATTTACATCATTCATTTCACAGATGATGTTTTGATGGCGGGAAAGG | | | |
| | | ACCCCCAAGATTTGCTTTTGTGTTATGGAGACTTACGAAAGGCCCTGG | | | |
| | | CTGATAAGGGATTACAAATTGCTTCTGAAAAGATACAAACTCAGGAT | | | |
| | | CCTTATAATTATTTGGGTTTTAGACTCACTGACCAAGCTGTTTTTCACC | | | |
| | | AGAAAATTGTTATTCGTAGAGATAACTTAAGGACCTTAAATGATTTTC | | | |
| | | AAAAATTGTTAGGTGATATAAACTGGCTTCGCCCCTATCTAAAGCTTA | | | |
| | | CTACAGGGGAGTTGAAACCTTTATTTGATATTCTTAAAGGGAGTTCTG | | | |
| | | ATCCTACTTCCCCTAGATCCCTAACCTCAGAAGGTTTACTGGCCTTACA | | | |
| | | GCTAGTGGAAAAGGCTATTGAAGAACAGTTTGTCACTTACATAGATT | | | |
| | | ACTCCCTGCCGCTGCACCTGTTAATTTTTAACACGACTCATGTGCCTAC | | | |
| | | GGGATTGCTATGGCAAAAATTTCCTATAATGTGGATACATTCAAGGAT | | | |
| | | TTCTCCCAAACGTAATATTTTGCCATATCATGAAGCAGTGGCTCAGAT | | | |
| | | GATTATCACTGGAAGAAGGCAGGCATTGACTTATTTTGGAAAGGAGC | | | |
| | | CAGATATCATTGTCCAGCCTTACAGCGTGAGTCAGGACACTTGGCTG | | | |
| | | AAACAGCATAGTACAGATTGGTTGCTTGCACAATTAGGGTTTGAAGG | | | |
| | | AACTATAGATAGCCACTACCCCCAAGATAGGTTGATAAAATTCTTAAA | | | |
| | | TGTACATGATATGATATTTCCTAAGATGACTTCCTTACAGCCTTTAAAT | | | |
| | | AATGCTCTATTGATTTTTACTGATGGCTCCTCTAAAGGGCGAGCTGGA | | | |
| | | TATCTTATTAGTAATCAACAGGTTATCGTAGAGACTCCTGGTCTCTCG | | | |
| | | GCTCAGCTCGCCGAACTAACAGCAGTACTGAAGGTTTTTCAGTCTGTA | | | |
| | | CAGGAGGCTTTTAATATTTTTACTGACAGTTTATATGTTGCTCAGTCA | | | |
| | | GTACCCTTATTGGAAACCTGTGGTACTTTTAACTTCAATACGCCGTCA | | | |
| | | GGATCTTTATTTTCAGAATTACAAAACATCATTCTCGCCCGGAAAAAT | | | |
| | | CCGTTTTATATTGGCCACATACGGTCTCACTCTGGTCTTCCTGGACCTC | | | |
| | | TGGCAGAGGGTAATAATTGCATTGACAGAGCTCTAATAGGAGAAGCC | | | |
| | | TTAGTTTCAGATCGGGTTGCTTTGGCCCAACGTGATCATGAAAGGTTT | | | |
| | | CATCTCTCTAGCCATACCCTAAGGCTCCGACATAAGATCACCAAGGAG | | | |
| | | CAAGCGAGAATGATTGTAAAACAATGTCCTAAATGTATTACTTTATCT | | | |
| | | CCAGTGCCGCATCTAGGAGTTAATCCTAGAGGCCTTATGCCTAATCAT | | | |
| | | ATTTGGCAAATGGATATAACCCATTATGCAGAATTTGGAAAACTAAA | | | |
| | | ATATATACATGTTTGCATTGATACTTGTTCAGGATTTCTCTTTGCTTCTC | | | |
| | | TGCATACAGGAGAAGCTTCAAAAAACGTAATTGATCATTGCCTACAA | | | |
| | | GCATTTAATGCCATGGGATTACCTAAACTTATTAAGACAGACAATGG | | | |
| | | GCCATCTTATTCCAGTAAAAACTTTATTTCATTCTGTAAAGAATTCGGT | | | |
| | | ATTAAACATAAAACTGGAATTCCTTACAACCCCATGGGACAAGGAAT | | | |
| | | AGTTGAACGTGCTCATCGCACCTTAAAGAATTGGCTCTTTAAGACAAA | | | |
| | | AGAGGGGCAGCTATATCCCCCAAGGTCTCCAAAGGCCCACCTTGCCT | | | |
| | | TCACCTTATTTGTCCTAAATTTCTTGCACACCGATATCAAGGGCCAGTC | | | |
| | | TGCAGCGGATCGCCACTGGCATCCAGTTACTTCTAATTCTTATGCATT | | | |
| | | GGTAAAATGGAAGGACCCCCTGACTAATGAATGGAAGGGTCCAGAT | | | |
| | | CCAGTTCTAATTTGGGGTAGAGGCTCAGTTTGTGTTTTTTCACGAGAT | | | |
| | | GAAGATGGAGCACGGTGGCTGCCAGAGAGATTAATTCGTCAGACGA | | | |
| | | ACACAGATTCTGACTCTTCTGGTAAGTATCATTCTAAAGACTAAAATT | | | |
| | | CCTTTTGTGCTTAAAATTCAGCTGAGAGCAACAGCTCTCAAAGCTGTT | | | |
| | | CTCCAGCTACTCTCTGAGCCAGCTCCCGACAGGAGGCCGGAGACTAG | | | |
| | | CCTCAGCTTTACAATTTGCATTTAAATAAAGTACCTAGACTTCCCCGAA | | | |
| | | AAAAGTTCTGCTTTTCTACTTTCTCACTGTCTTTCAAGATTTTGTCTTTC | | | |
| | | AAGCAGGTAAATCAACATTCTCGAGGCGGACCAGCGGATGTGCATCC | | | |
| | | CCGCCCCCCTAGAGCACTCAGGTGGCAGCTGTTATCCCCAGTCTCAGG | | | |
| | | ACATTCCAGCATGTGGCCTTCAGTCTGAGTTAAAAATTAGGTTTACCC | | | |
| | | AGAGGACTAGAATAGTAGATATTTCTATATTAATAAAGATTGGTTTTT | | | |
| | | ATTTTGATAGACAGGCTTAGCCCCTTAGCTGACCTCTGGCTTTTCACCC | | | |
| | | TTGCTGTTACTGCAAGGTGTCTTTAGCTCAATAAGGCTGTGGAAAAAA | | | |
| | | ACAGGGATGAGGAGGAACGGCTCCCAGCTCCTATTTTAGCCACAAAT | | | |
| | | CGTGGTGTTACTAACGACATAATTCTTGCTTAGGCTTTGCTAAATCTG | | | |
| | | AGGTTGATAATTCTCCTTTAGGAGCTGCACAGCGCTCAGAACTGTGCA | | | |
| | | TACTGATTTGTGATGGTACAAATTCAGTATGGGCATCGCTTGGTGCA | | | |
| | | GATGGAGGTACTGCAAGGAAAGGTCCCAGCTTGACCATTTCTGAGTT | | | |
| | | TCCTGTGAGATAAACCCGGTTTGAAAGAGGTTGGTACCAAATTATAT | | | |
| | | ATCCCTCGGCTCTACCTCGCCTCCCCAAAAGGTACCAGAGCCACAGGT | | | |
| | | GTGGATTTTAACAGAATCCACGGGAGGAATCGGGTCCATGTCCACCC | | | |
| | | AAGCCAAGGTTAAAAGCCCACTCATCTACGGATGAGAAAATCATTTG | | | |
| | | ATCACCTCAGTTAAGCGCTGCCTTATTTTAACTTAATTAATAGGGGGG | | | |
| | | AGAGAGATTGGAGACTTACTATTGAAAGGGCAAGCCCTTCACTGCCT | | | |
| | | CCCACCCAAATAAAAAAGCCAATTGGCCTTGTACTACAGAGCTGGCC | | | |
| | | GGACCCCTTATCCCTGTTACCCACCAATCATCCAAAAATGCGGAGGAA | | | |
| | | TATCAACTTAGTGTTATTCTTATTATAGTGTATTTCACACTTGTTCAGTC | | | |
| | | AAACTTAGCCAGAGTTCCAACGCCCTACTTAAAATTCAACTAGAAAGT | | | |
| | | TACCTACCAAGTACTAATTAGCATTATAAAGTCAGAGCCTACAGCTCC | | | |
| | | AGGCTTTTCAGTTAGTTGTTTACTAAGATAAGAAAAGACAGTCTTAGC | | | |
| | | CAGATACAGTTTACCATAATAAAAGTTAAAGAATCCCAGGGAAGCAA | | | |
| | | GTTTTTTCTTTTAGCCCTAGATTCCAGGCAGAACTATTGAGCATAGAT | | | |
| | | AATTTTTCCCCCTCAGGCCAGCTTTTTCTTTTTTTTTAATTTTGTTAATA | | | |
| | | AAAGGGAGGAGATGTAGTCTCCCCTCCCCCAGCCTGAAACCTGCTTG | | | |
| | | CTCAGGGGTGGAGCTTCCCGCTCATCGCTCTGCCACGCCCACTGCTG | | | |
| | | GAACCTGCGGAGCCACACACGTGCACCTTTCTACTGGACCAGAGATT | | | |
| | | ATTCGGCGGGAATCGGGTCCCCTCCCCCTTCCTTCATAACTAGTGTCC | | | |
| | | CAACAATAAAATTTGAGCTTTGATCAGAATGAATTTGTCTTGGCTCCG | | | |
| | | TTTCTTCTTTCGCCCCGTCTAGATTCCTCTCTTACAGCTCGAGTGGCCT | | | |
| | | TCTCAGTCGAACCGTTCACGTTGCGAGCTGCTGGCGGCCGCAACAGG | | | |
| | | GGATCCAGACATGATAAGATACATTGATGAGTTTGGACAAACCACAA | | | |
| | | CTAGAATGCAGTGAAAAAAATGCTTTATTTGTGAAATTTGTGATGCTA | | | |
| | | TTGCTTTATTTGTAACCATTATAAGCTGCAATAAACAAGTTAACAACA | | | |
| | | ACAATTGCATTCATTTTATGTTTCAGGTTCAGGGGGAGGTGTGGGAG | | | |
| | | GTTTTTTCGGATCCTCTAGAGTCGACCTGCAGGCATGCAAGCTTGGCG | | | |
| | | TAATCATGGTCATAGCTGTTTCCTGTGTGAAATTGTTATCCGCTCACAA | | | |
| | | TTCCACACAACATACGAGCCGGAAGCATAAAGTGTAAAGCCTGGGGT | | | |
| | | GCCTAATGAGTGAGCTAACTCACATTAATTGCGTTGCGCTCACTGCCC | | | |
| | | GCTTTCCAGTCGGGAAACCTGTCGTGCCAGCTGCATTAATGAATCGG | | | |
| | | CCAACGCGCGGGGAGAGGCGGTTTGCGTATTGGGCGCTCTTCCGCTT | | | |
| | | CCTCGCTCACTGACTCGCTGCGCTCGGTCGTTCGGCTGCGGCGAGCG | | | |
| | | GTATCAGCTCACTCAAAGGCGGTAATACGGTTATCCACAGAATCAGG | | | |
| | | GGATAACGCAGGAAAGAACATGTGAGCAAAAGGCCAGCAAAAGGCC | | | |
| | | AGGAACCGTAAAAAGGCCGCGTTGCTGGCGTTTTTCCATAGGCTCCG | | | |
| | | CCCCCCTGACGAGCATCACAAAAATCGACGCTCAAGTCAGAGGTGGC | | | |
| | | GAAACCCGACAGGACTATAAAGATACCAGGCGTTTCCCCCTGGAAGC | | | |
| | | TCCCTCGTGCGCTCTCCTGTTCCGACCCTGCCGCTTACCGGATACCTGT | | | |
| | | CCGCCTTTCTCCCTTCGGGAAGCGTGGCGCTTTCTCATAGCTCACGCT | | | |
| | | GTAGGTATCTCAGTTCGGTGTAGGTCGTTCGCTCCAAGCTGGGCTGT | | | |
| | | GTGCACGAACCCCCCGTTCAGCCCGACCGCTGCGCCTTATCCGGTAAC | | | |
| | | TATCGTCTTGAGTCCAACCCGGTAAGACACGACTTATCGCCACTGGCA | | | |
| | | GCAGCCACTGGTAACAGGATTAGCAGAGCGAGGTATGTAGGCGGTG | | | |
| | | CTACAGAGTTCTTGAAGTGGTGGCCTAACTACGGCTACACTAGAAGG | | | |
| | | ACAGTATTTGGTATCTGCGCTCTGCTGAAGCCAGTTACCTTCGGAAAA | | | |
| | | AGAGTTGGTAGCTCTTGATCCGGCAAACAAACCACCGCTGGTAGCGG | | | |
| | | TGGTTTTTTTGTTTGCAAGCAGCAGATTACGCGCAGAAAAAAAGGAT | | | |
| | | CTCAAGAAGATCCTTTGATCTTTTCTACGGGGTCTGACGCTCAGTGGA | | | |
| | | ACGAAAACTCACGTTAAGGGATTTTGGTCATGAGATTATCAAAAAGG | | | |
| | | ATCTTCACCTAGATCCTTTTAAATTAAAAATGAAGTTTTAAATCAATCT | | | |
| | | AAAGTATATATGAGTAAACTTGGTCTGACAGTTACCAATGCTTAATCA | | | |
| | | GTGAGGCACCTATCTCAGCGATCTGTCTATTTCGTTCATCCATAGTTG | | | |
| | | CCTGACTCCCCGTCGTGTAGATAACTACGATACGGGAGGGCTTACCA | | | |
| | | TCTGGCCCCAGTGCTGCAATGATACCGCGAGACCCACGCTCACCGGC | | | |
| | | TCCAGATTTATCAGCAATAAACCAGCCAGCCGGAAGGGCCGAGCGCA | | | |
| | | GAAGTGGTCCTGCAACTTTATCCGCCTCCATCCAGTCTATTAATTGTTG | | | |
| | | CCGGGAAGCTAGAGTAAGTAGTTCGCCAGTTAATAGTTTGCGCAACG | | | |
| | | TTGTTGCCATTGCTACAGGCATCGTGGTGTCACGCTCGTCGTTTGGTA | | | |
| | | TGGCTTCATTCAGCTCCGGTTCCCAACGATCAAGGCGAGTTACATGAT | | | |
| | | CCCCCATGTTGTGCAAAAAAGCGGTTAGCTCCTTCGGTCCTCCGATCG | | | |
| | | TTGTCAGAAGTAAGTTGGCCGCAGTGTTATCACTCATGGTTATGGCA | | | |
| | | GCACTGCATAATTCTCTTACTGTCATGCCATCCGTAAGATGCTTTTCTG | | | |
| | | TGACTGGTGAGTACTCAACCAAGTCATTCTGAGAATAGTGTATGCGG | | | |
| | | CGACCGAGTTGCTCTTGCCCGGCGTCAATACGGGATAATACCGCGCC | | | |
| | | ACATAGCAGAACTTTAAAAGTGCTCATCATTGGAAAACGTTCTTCGGG | | | |
| | | GCGAAAACTCTCAAGGATCTTACCGCTGTTGAGATCCAGTTCGATGTA | | | |
| | | ACCCACTCGTGCACCCAACTGATCTTCAGCATCTTTTACTTTCACCAGC | | | |
| | | GTTTCTGGGTGAGCAAAAACAGGAAGGCAAAATGCCGCAAAAAAGG | | | |
| | | GAATAAGGGCGACACGGAAATGTTGAATACTCATACTCTTCCTTTTTC | | | |
| | | AATATTATTGAAGCATTTATCAGGGTTATTGTCTCATGAGCGGATACA | | | |
| | | TATTTGAATGTATTTAGAAAAATAAACAAATAGGGGTTCCGCGCACAT | | | |
| | | TTCCCCGAAAAGTGCCACCTGACGTCTAAGAAACCATTATTATCATGA | | | |
| | | CATTAACCTATAAAAATAGGCGTATCACGAGGCCCTTTCGTCTCGCGC | | | |
| | | GTTTCGGTGATGACGGTGAAAACCTCTGACACATGCAGCTCCCGGAG | | | |
| | | ACGGTCACAGCTTGTCTGTAAGCGGATGCCGGGAGCAGACAAGCCC | | | |
| | | GTCAGGGCGCGTCAGCGGGTGTTGGCGGGTGTCGGGGCTGGCTTAA | | | |
| | | CTATGCGGCATCAGAGCAGATTGTACTGAGAGTGCACCATATGCGGT | | | |
| | | GTGAAATACCGCACAGATGCGTAAGGAGAAAATACCGCATCAGGCG | | | |
| | | CCATTCGCCATTCAGGCTGCGCAACTGTTGGGAAGGGCGATCGGTGC | | | |
| | | GGGCCTCTTCGCTATTACGCCAGCTGGCGAAAGGGGGATGTGCTGCA | | | |
| | | AGGCGATTAAGTTGGGTAACGCCAGGGTTTTCCCAGTCACGACGTTG | | | |
| | | TAAAACGACGGCCAGT | | | |
| DRIVER_ | PLV10048 | GAATTCGAGCTTGCATGCCTGCAGGTCGTTACATAACTTACGGTAAAT | 316 | N/A | |
| pCMV_R- | | GGCCCGCCTGGCTGACCGCCCAACGACCCCCGCCCATTGACGTCAAT | | | |
| U5- | | AATGACGTATGTTCCCATAGTAACGCCAATAGGGACTTTCCATTGACG | | | |
| MusD6- | | TCAATGGGTGGAGTATTTACGGTAAACTGCCCACTTGGCAGTACATC | | | |
| LTR_v3 | | AAGTGTATCATATGCCAAGTACGCCCCCTATTGACGTCAATGACGGTA | | | |
| | | AATGGCCCGCCTGGCATTATGCCCAGTACATGACCTTATGGGACTTTC | | | |
| | | CTACTTGGCAGTACATCTACGTATTAGTCATCGCTATTACCATGGTGA | | | |
| | | TGCGGTTTTGGCAGTACATCAATGGGCGTGGATAGCGGTTTGACTCA | | | |
| | | CGGGGATTTCCAAGTCTCCACCCCATTGACGTCAATGGGAGTTTGTTT | | | |
| | | TGGCACCAAAATCAACGGGACTTTCCAAAATGTCGTAACAACTCCGCC | | | |
| | | CCATTGACGCAAATGGGCGGTAGGCGTGTACGGTGGGAGGTCTATA | | | |
| | | TAAGCAGAGCTGAGCTTTGATCAGAATGAATTTGTCTTGGCTCCGTTT | | | |
| | | CTTCTTTCGCCCCGTCTAGATTCCTCTCTTACAGCTCGAGTGGCCTTCT | | | |
| | | CAGTCGAACCGTTCACGTTGCGAGCTGCTGGCGGCCGCAACATTTTG | | | |
| | | GCGCCAGAACTGGGACCTGAAGAATGGCAGAGAGATGCTAAGAGGA | | | |
| | | ACGCTGCTTTGGAGCTCCACAGGAAAGGATCTTCGTATCGGACATCG | | | |
| | | GAGCAACGGACAGGTACACATGCTAGCGCTAGCTTAAAATTTCAGTT | | | |
| | | TTGTAAAGTGTTGCTGAGGATGTGGTAGGATACGAATTAAGCTTGAA | | | |
| | | TCAGTGCTAACCCAACGCTGGTTCTGCTTGGGTCAGCAGCGTGTTAAT | | | |
| | | CGGAACTAGAAACGGAAACAGGCAGGTTAGCCGCAGCTTTTTAGGA | | | |
| | | AGCTGCTTAGGTGGAAGAAGAAAGGGTTTAAAGTCATGGATCAGGC | | | |
| | | GGTTGCCCATAGTTTTCAGGAGTTGTTTCAGGCCAGAGGAGTAAGGC | | | |
| | | TTGAAGTACAATTAGTAAAAAATTTTTTAGGTAAGATAGATAGCTGTT | | | |
| | | GCCCATGGTTCAAGGAAGAAGAAACACTAGATTGTGGAACCTGGGA | | | |
| | | GAAAGTTGGTGAGGCCTTAAAAATCACTCAGGCAGATAATTTTACCCT | | | |
| | | AGGCCTCTGGGCACTCATAAATGATGCAATAAAAGATGCCACTTCCCC | | | |
| | | AGGGCTAAGTTGCCCCCAGGCGGAGCTTGTGGTATCTCAGGAGGAG | | | |
| | | TGCCTGTCAGAGAGGGCCTCCTCAGAAAAAGATCTTCTTAACTCAAAA | | | |
| | | ATTGATAAATGTGGAAACTCGGATGAAAAACTGATTTTTAACAAAAA | | | |
| | | TCACTCAGATAGAGGAGCTGCCCATTACCTTAATGAGAATTGGTCCTC | | | |
| | | TTGTGAATCTCCTGCTCAACCTGTAGTCCCCACTTCGGGAGGTGCCAC | | | |
| | | TCATAGGGACACACGACTAAGCGAGTTAGAGTTTGAGATTAAGCTTC | | | |
| | | AGAGGCTGACTAATGAGCTTCGGGAACTAAAAAAGATGTCAGAAGC | | | |
| | | GGAGAAGAGTAACTCTTCTGTAGTTCACCAGGTGCCGCTAGAAAAGG | | | |
| | | TTGTGAGTCAGGCTCATGGGAAAGGACAGAATATCTCTAATACGCTA | | | |
| | | GCCTTTCCTGTGGTTGAGGTAGTTGATCAGCAAGATACTAGGGGCAG | | | |
| | | ACATTACCAGACCTTAGATTTCAAGTTGATAAAAGAGTTAAAGGCGG | | | |
| | | CTGTTGTGCAATATGGCCCTTCAGCCCCATTCACTCAAGCATTACTGG | | | |
| | | ACACAGTTGTGGAGTCACACTTAACCCCTTTAGATTGGAAGACTCTTT | | | |
| | | CTAAGGCTACCCTGTCAGGAGGAGATTTTTTGCTTTGGGATTCTGAAT | | | |
| | | GGCGAGACGCCAGTAAGAAAACTGCTGCTTCTAACGCTCAGGCTGGT | | | |
| | | AATTCAGACTGGGATAGCAACATGCTTTTAGGAGAGGGCCCTTATGA | | | |
| | | GGGACAGACAAATCAGATTGATTTTCCCGTTGCAGTGTACGCGCAAA | | | |
| | | TTGCGACGGCCGCACGCCGTGCTTGGGGAAGGTTGCCAGTCAAAGG | | | |
| | | AGAGATTGGTGGAAGTTTAGCTAGCATTCGGCAGAGTTCTGATGAAC | | | |
| | | CATATCAGGATTTTGTGGACAGGCTATTGATTTCAGCTAGTAGAATCC | | | |
| | | TTGGAAATCCGGACACGGGAAGTCCTTTCGTTATGCAATTGGCTTATG | | | |
| | | AGAATGCTAACGCAATTTGCCGAGCTGCGATTCAACCGCATAAGGGA | | | |
| | | ACGACAGATTTGGCGGGATATGTCCGTCTTTGCGCAGACATCGGGCC | | | |
| | | TTCCTGCGAGACCTTGCAGGGAACCCACGCGCAGGCAATGTTCTCTA | | | |
| | | GGAAACGAGGGAATAGTGCATGCTTTAAATGTGGAAGTTTAGATCAT | | | |
| | | TTTAGAATTGATTGTCCTCAGAACAAGGGCGCCGAGGTTAGACAAAC | | | |
| | | AGGCCGTGCCCCGGGAATATGTCCCCGATGTGGAAAGGGCCGCCACT | | | |
| | | GGGCGAAAGATTGCAAGCATAAAACGAGGGTTTTGAGCCGCCCGGT | | | |
| | | GCCGGGAAACGAGGAAAGGGGTCAGCCCCAGGCCCCAAGTTACTCA | | | |
| | | AAGAAGACAGCTTATGGGGCTCTAAATCTGCTGCCCAGCCAACAAGA | | | |
| | | TCAGTTCTTGAGCTTGTCAGGTCAAACCCAGGAAACGCAAGACTGGA | | | |
| | | CCTCTGTTCCACTGTCCATGCAGCATTAACCCCAGAAGTGGGAGTCCA | | | |
| | | AACTCTGCCTACCGGAGTCTTTGGACCACTACCTGTAGGAACCTGTGG | | | |
| | | TTTTCTCTTAGGACGAAGCAGTTCTATTGTAGAAGGCCTGCAGATTTA | | | |
| | | TCCAGGTGTTATAAGTAATGATTATGAGGGAGAAATTAAAATCATAG | | | |
| | | CCGCTTGCCCTCGTGGTGCTATAACTATACCCGCTAATCAGAAAATTG | | | |
| | | CTCAACTTACCTTGATCCCCTTGCGCTGGTCACTATCTAAATTCTCTAA | | | |
| | | AAATGAAGAAGGACAGATTAACTTTGACTCCTCTGGCGTAAATTGGG | | | |
| | | TGAAATCTATCACTAATCAGAGACCTAACCTTAAATTGATTCTTGATG | | | |
| | | GAAAAAGCTTTGAAGGATTAATAGATACCGGGGCCGATGTAACCATT | | | |
| | | ATTAGAGGGCAGGACTGGCCCTCAAACTGGCCCCTGTCTGTTTCCTTG | | | |
| | | ACTCACCTTCAAGGAATTGGTTATGCCAGTAACCCAAAACGTAGTTCC | | | |
| | | AAATTGCTAACCTGGAGAGATGAGGATGGAAAATCAGGAAATATTCA | | | |
| | | GCCGTATGTTATGCAAAATTTGCCTGTAACCCTGTGGGGAAGAGATC | | | |
| | | TGTTGTCACAGATGGGCGTTATCCTGTGCAGTTCTAAGGAAATGGTG | | | |
| | | ACTGAACAGACGTTCAGGCAGGGACCCCTGCCTGATCGTGGACTAAT | | | |
| | | AAAGAAGGGACAGAAAATTAAGACTTTTGAAGATCTTAAACCCCACT | | | |
| | | CTAACGTGAGAGGTTTAAAGTATTTTCAGTAGTGGCCGCTGTCTTGCC | | | |
| | | TGCATCCCACGCCGAAAAAATTCAATGGCGTAATGATATTCCGGTGT | | | |
| | | GGGTAGATCAGTGGTCTTTACCTAAAGAGAAAATAGAGGCCGCTTCT | | | |
| | | CTGCTAGTGCAGGAGCAGTTAGAAGCAGGACATTTGGTGGAGTCTCA | | | |
| | | TTCTCCCTGGAATACACCCATTTTCATTATCAGGAAGAAATCGGGAAA | | | |
| | | ATGGAGACTGTTGCAAGATTTAAGAAAGGTTAATGAAACCATGGTAC | | | |
| | | TTATGGGAACTTTACAACCGGGGCTCCCCTCCCCAGTAGCCATTCCTA | | | |
| | | AGGGATACTATAAGATTGTTATAGATTTGAAAGATTGTTTCTTTACCA | | | |
| | | TCCCTTTGCATCCAGAGGATTGTGAGAGATTTGCTTTTAGTGTTCCTTC | | | |
| | | TGTAAATTTCAAGGAACCCATGAAAAGATATCAATGGACAGTTCTCCC | | | |
| | | GCAGGGGATGGCTAATAGTCCCACCTTATGTCAAAAGTTTGTGGCAA | | | |
| | | AGGCAATTCAGCCTGTTAGACAACAATGGCCAAATATTTACATCATTC | | | |
| | | ATTTCACAGATGATGTTTTGATGGCGGGAAAGGACCCCCAAGATTTG | | | |
| | | CTTTTGTGTTATGGAGACTTACGAAAGGCCCTGGCTGATAAGGGATT | | | |
| | | ACAAATTGCTTCTGAAAAGATACAAACTCAGGATCCTTATAATTATTT | | | |
| | | GGGTTTTAGACTCACTGACCAAGCTGTTTTTCACCAGAAAATTGTTAT | | | |
| | | TCGTAGAGATAACTTAAGGACCTTAAATGATTTTCAAAAATTGTTAGG | | | |
| | | TGATATAAACTGGCTTCGCCCCTATCTAAAGCTTACTACAGGGGAGTT | | | |
| | | GAAACCTTTATTTGATATTCTTAAAGGGAGTTCTGATCCTACTTCCCCT | | | |
| | | AGATCCCTAACCTCAGAAGGTTTACTGGCCTTACAGCTAGTGGAAAA | | | |
| | | GGCTATTGAAGAACAGTTTGTCACTTACATAGATTACTCCCTGCCGCT | | | |
| | | GCACCTGTTAATTTTTAACACGACTCATGTGCCTACGGGATTGCTATG | | | |
| | | GCAAAAATTTCCTATAATGTGGATACATTCAAGGATTTCTCCCAAACG | | | |
| | | TAATATTTTGCCATATCATGAAGCAGTGGCTCAGATGATTATCACTGG | | | |
| | | AAGAAGGCAGGCATTGACTTATTTTGGAAAGGAGCCAGATATCATTG | | | |
| | | TCCAGCCTTACAGCGTGAGTCAGGACACTTGGCTGAAACAGCATAGT | | | |
| | | ACAGATTGGTTGCTTGCACAATTAGGGTTTGAAGGAACTATAGATAG | | | |
| | | CCACTACCCCCAAGATAGGTTGATAAAATTCTTAAATGTACATGATAT | | | |
| | | GATATTTCCTAAGATGACTTCCTTACAGCCTTTAAATAATGCTCTATTG | | | |
| | | ATTTTTACTGATGGCTCCTCTAAAGGGCGAGCTGGATATCTTATTAGT | | | |
| | | AATCAACAGGTTATCGTAGAGACTCCTGGTCTCTCGGCTCAGCTCGCC | | | |
| | | GAACTAACAGCAGTACTGAAGGTTTTTCAGTCTGTACAGGAGGCTTTT | | | |
| | | AATATTTTTACTGACAGTTTATATGTTGCTCAGTCAGTACCCTTATTGG | | | |
| | | AAACCTGTGGTACTTTTAACTTCAATACGCCGTCAGGATCTTTATTTTC | | | |
| | | AGAATTACAAAACATCATTCTCGCCCGGAAAAATCCGTTTTATATTGG | | | |
| | | CCACATACGGTCTCACTCTGGTCTTCCTGGACCTCTGGCAGAGGGTAA | | | |
| | | TAATTGCATTGACAGAGCTCTAATAGGAGAAGCCTTAGTTTCAGATCG | | | |
| | | GGTTGCTTTGGCCCAACGTGATCATGAAAGGTTTCATCTCTCTAGCCA | | | |
| | | TACCCTAAGGCTCCGACATAAGATCACCAAGGAGCAAGCGAGAATGA | | | |
| | | TTGTAAAACAATGTCCTAAATGTATTACTTTATCTCCAGTGCCGCATCT | | | |
| | | AGGAGTTAATCCTAGAGGCCTTATGCCTAATCATATTTGGCAAATGGA | | | |
| | | TATAACCCATTATGCAGAATTTGGAAAACTAAAATATATACATGTTTG | | | |
| | | CATTGATACTTGTTCAGGATTTCTCTTTGCTTCTCTGCATACAGGAGAA | | | |
| | | GCTTCAAAAAACGTAATTGATCATTGCCTACAAGCATTTAATGCCATG | | | |
| | | GGATTACCTAAACTTATTAAGACAGACAATGGGCCATCTTATTCCAGT | | | |
| | | AAAAACTTTATTTCATTCTGTAAAGAATTCGGTATTAAACATAAAACT | | | |
| | | GGAATTCCTTACAACCCCATGGGACAAGGAATAGTTGAACGTGCTCA | | | |
| | | TCGCACCTTAAAGAATTGGCTCTTTAAGACAAAAGAGGGGCAGCTAT | | | |
| | | ATCCCCCAAGGTCTCCAAAGGCCCACCTTGCCTTCACCTTATTTGTCCT | | | |
| | | AAATTTCTTGCACACCGATATCAAGGGCCAGTCTGCAGCGGATCGCC | | | |
| | | ACTGGCATCCAGTTACTTCTAATTCTTATGCATTGGTAAAATGGAAGG | | | |
| | | ACCCCCTGACTAATGAATGGAAGGGTCCAGATCCAGTTCTAATTTGG | | | |
| | | GGTAGAGGCTCAGTTTGTGTTTTTTCACGAGATGAAGATGGAGCACG | | | |
| | | GTGGCTGCCAGAGAGATTAATTCGTCAGACGAACACAGATTCTGACT | | | |
| | | CTTCTGGTAAGTATCATTCTAAAGACTAAAATTCCTTTTGTGCTTAAAA | | | |
| | | TTCAGCTGAGAGCAACAGCTCTCAAAGCTGTTCTCCAGCTACTCTCTG | | | |
| | | AGCCAGCTCCCGACAGGAGGCCGGAGACTAGCCTCAGCTTTACAATT | | | |
| | | TGCATTTAAATAAAGTACCTAGACTTCCCCGAAAAAAGTTCTGCTTTTC | | | |
| | | TACTTTCTCACTGTCTTTCAAGATTTTGTCTTTCAAGCAGGTAAATCAA | | | |
| | | CATTCTCGAGGCGGACCAGCGGATGTGCATCCCCGCCCCCCTAGAGC | | | |
| | | ACTCAGGTGGCAGCTGTTATCCCCAGTCTCAGGACATTCCAGCATGTG | | | |
| | | GCCTTCAGTCTGAGTTAAAAATTAGGTTTACCCAGAGGACTAGAATA | | | |
| | | GTAGATATTTCTATATTAATAAAGATTGGTTTTTATTTTGATAGACAGG | | | |
| | | CTTAGCCCCTTAGCTGACCTCTGGCTTTTCACCCTTGCTGTTACTGCAA | | | |
| | | GGTGTCTTTAGCTCAATAAGGCTGTGGAAAAAAACAGGGATGAGGA | | | |
| | | GGAACGGCTCCCAGCTCCTATTTTAGCCACAAATCGTGGTGTTACTAA | | | |
| | | CGACATAATTCTTGCTTAGGCTTTGCTAAATCTGAGGTTGATAATTCTC | | | |
| | | CTTTAGGAGCTGCACAGCGCTCAGAACTGTGCATACTGATTTGTGATG | | | |
| | | GTACAAATTCAGTATGGGCATCGCTTGGTGCAGATGGAGGTACTGCA | | | |
| | | AGGAAAGGTCCCAGCTTGACCATTTCTGAGTTTCCTGTGAGATAAACC | | | |
| | | CGGTTTGAAAGAGGTTGGTACCAAATTATATATCCCTCGGCTCTACCT | | | |
| | | CGCCTCCCCAAAAGGTACCAGAGCCACAGGTGTGGATTTTAACAGAA | | | |
| | | TCCACGGGAGGAATCGGGTCCATGTCCACCCAAGCCAAGGTTAAAAG | | | |
| | | CCCACTCATCTACGGATGAGAAAATCATTTGATCACCTCAGTTAAGCG | | | |
| | | CTGCCTTATTTTAACTTAATTAATAGGGGGGAGAGAGATTGGAGACT | | | |
| | | TACTATTGAAAGGGCAAGCCCTTCACTGCCTCCCACCCAAATAAAAAA | | | |
| | | GCCAATTGGCCTTGTACTACAGAGCTGGCCGGACCCCTTATCCCTGTT | | | |
| | | ACCCACCAATCATCCAAAAATGCGGAGGAATATCAACTTAGTGTTATT | | | |
| | | CTTATTATAGTGTATTTCACACTTGTTCAGTCAAACTTAGCCAGAGTTC | | | |
| | | CAACGCCCTACTTAAAATTCAACTAGAAAGTTACCTACCAAGTACTAA | | | |
| | | TTAGCATTATAAAGTCAGAGCCTACAGCTCCAGGCTTTTCAGTTAGTT | | | |
| | | GTTTACTAAGATAAGAAAAGACAGTCTTAGCCAGATACAGTTTACCAT | | | |
| | | AATAAAAGTTAAAGAATCCCAGGGAAGCAAGTTTTTTCTTTTAGCCCT | | | |
| | | AGATTCCAGGCAGAACTATTGAGCATAGATAATTTTTCCCCCTCAGGC | | | |
| | | CAGCTTTTTCTTTTTTTTTAATTTTGTTAATAAAAGGGAGGAGATGTAG | | | |
| | | TCTCCCCTCCCCCAGCCTGAAACCTGCTTGCTCAGGGGTGGAGCTTCC | | | |
| | | CGCTCATCGCTCTGCCACGCCCACTGCTGGAACCTGCGGAGCCACAC | | | |
| | | ACGTGCACCTTTCTACTGGACCAGAGATTATTCGGCGGGAATCGGGT | | | |
| | | CCCCTCCCCCTTCCTTCATAACTAGTGTCCCAACAATAAAATTTGAGCT | | | |
| | | TTGATCAGAATGAATTTGTCTTGGCTCCGTTTCTTCTTTCGCCCCGTCT | | | |
| | | AGATTCCTCTCTTACAGCTCGAGTGGCCTTCTCAGTCGAACCGTTCAC | | | |
| | | GTTGCGAGCTGCTGGCGGCCGCAACAGGGGATCCAGACATGATAAG | | | |
| | | ATACATTGATGAGTTTGGACAAACCACAACTAGAATGCAGTGAAAAA | | | |
| | | AATGCTTTATTTGTGAAATTTGTGATGCTATTGCTTTATTTGTAACCAT | | | |
| | | TATAAGCTGCAATAAACAAGTTAACAACAACAATTGCATTCATTTTAT | | | |
| | | GTTTCAGGTTCAGGGGGAGGTGTGGGAGGTTTTTTCGGATCCTCTAG | | | |
| | | AGTCGACCTGCAGGCATGCAAGCTTGGCGTAATCATGGTCATAGCTG | | | |
| | | TTTCCTGTGTGAAATTGTTATCCGCTCACAATTCCACACAACATACGA | | | |
| | | GCCGGAAGCATAAAGTGTAAAGCCTGGGGTGCCTAATGAGTGAGCT | | | |
| | | AACTCACATTAATTGCGTTGCGCTCACTGCCCGCTTTCCAGTCGGGAA | | | |
| | | ACCTGTCGTGCCAGCTGCATTAATGAATCGGCCAACGCGCGGGGAGA | | | |
| | | GGCGGTTTGCGTATTGGGCGCTCTTCCGCTTCCTCGCTCACTGACTCG | | | |
| | | CTGCGCTCGGTCGTTCGGCTGCGGCGAGCGGTATCAGCTCACTCAAA | | | |
| | | GGCGGTAATACGGTTATCCACAGAATCAGGGGATAACGCAGGAAAG | | | |
| | | AACATGTGAGCAAAAGGCCAGCAAAAGGCCAGGAACCGTAAAAAGG | | | |
| | | CCGCGTTGCTGGCGTTTTTCCATAGGCTCCGCCCCCCTGACGAGCATC | | | |
| | | ACAAAAATCGACGCTCAAGTCAGAGGTGGCGAAACCCGACAGGACT | | | |
| | | ATAAAGATACCAGGCGTTTCCCCCTGGAAGCTCCCTCGTGCGCTCTCC | | | |
| | | TGTTCCGACCCTGCCGCTTACCGGATACCTGTCCGCCTTTCTCCCTTCG | | | |
| | | GGAAGCGTGGCGCTTTCTCATAGCTCACGCTGTAGGTATCTCAGTTCG | | | |
| | | GTGTAGGTCGTTCGCTCCAAGCTGGGCTGTGTGCACGAACCCCCCGT | | | |
| | | TCAGCCCGACCGCTGCGCCTTATCCGGTAACTATCGTCTTGAGTCCAA | | | |
| | | CCCGGTAAGACACGACTTATCGCCACTGGCAGCAGCCACTGGTAACA | | | |
| | | GGATTAGCAGAGCGAGGTATGTAGGCGGTGCTACAGAGTTCTTGAA | | | |
| | | GTGGTGGCCTAACTACGGCTACACTAGAAGGACAGTATTTGGTATCT | | | |
| | | GCGCTCTGCTGAAGCCAGTTACCTTCGGAAAAAGAGTTGGTAGCTCT | | | |
| | | TGATCCGGCAAACAAACCACCGCTGGTAGCGGTGGTTTTTTTGTTTGC | | | |
| | | AAGCAGCAGATTACGCGCAGAAAAAAAGGATCTCAAGAAGATCCTTT | | | |
| | | GATCTTTTCTACGGGGTCTGACGCTCAGTGGAACGAAAACTCACGTTA | | | |
| | | AGGGATTTTGGTCATGAGATTATCAAAAAGGATCTTCACCTAGATCCT | | | |
| | | TTTAAATTAAAAATGAAGTTTTAAATCAATCTAAAGTATATATGAGTA | | | |
| | | AACTTGGTCTGACAGTTACCAATGCTTAATCAGTGAGGCACCTATCTC | | | |
| | | AGCGATCTGTCTATTTCGTTCATCCATAGTTGCCTGACTCCCCGTCGTG | | | |
| | | TAGATAACTACGATACGGGAGGGCTTACCATCTGGCCCCAGTGCTGC | | | |
| | | AATGATACCGCGAGACCCACGCTCACCGGCTCCAGATTTATCAGCAAT | | | |
| | | AAACCAGCCAGCCGGAAGGGCCGAGCGCAGAAGTGGTCCTGCAACT | | | |
| | | TTATCCGCCTCCATCCAGTCTATTAATTGTTGCCGGGAAGCTAGAGTA | | | |
| | | AGTAGTTCGCCAGTTAATAGTTTGCGCAACGTTGTTGCCATTGCTACA | | | |
| | | GGCATCGTGGTGTCACGCTCGTCGTTTGGTATGGCTTCATTCAGCTCC | | | |
| | | GGTTCCCAACGATCAAGGCGAGTTACATGATCCCCCATGTTGTGCAA | | | |
| | | AAAAGCGGTTAGCTCCTTCGGTCCTCCGATCGTTGTCAGAAGTAAGTT | | | |
| | | GGCCGCAGTGTTATCACTCATGGTTATGGCAGCACTGCATAATTCTCT | | | |
| | | TACTGTCATGCCATCCGTAAGATGCTTTTCTGTGACTGGTGAGTACTC | | | |
| | | AACCAAGTCATTCTGAGAATAGTGTATGCGGCGACCGAGTTGCTCTT | | | |
| | | GCCCGGCGTCAATACGGGATAATACCGCGCCACATAGCAGAACTTTA | | | |
| | | AAAGTGCTCATCATTGGAAAACGTTCTTCGGGGCGAAAACTCTCAAG | | | |
| | | GATCTTACCGCTGTTGAGATCCAGTTCGATGTAACCCACTCGTGCACC | | | |
| | | CAACTGATCTTCAGCATCTTTTACTTTCACCAGCGTTTCTGGGTGAGCA | | | |
| | | AAAACAGGAAGGCAAAATGCCGCAAAAAAGGGAATAAGGGCGACA | | | |
| | | CGGAAATGTTGAATACTCATACTCTTCCTTTTTCAATATTATTGAAGCA | | | |
| | | TTTATCAGGGTTATTGTCTCATGAGCGGATACATATTTGAATGTATTT | | | |
| | | AGAAAAATAAACAAATAGGGGTTCCGCGCACATTTCCCCGAAAAGTG | | | |
| | | CCACCTGACGTCTAAGAAACCATTATTATCATGACATTAACCTATAAA | | | |
| | | AATAGGCGTATCACGAGGCCCTTTCGTCTCGCGCGTTTCGGTGATGA | | | |
| | | CGGTGAAAACCTCTGACACATGCAGCTCCCGGAGACGGTCACAGCTT | | | |
| | | GTCTGTAAGCGGATGCCGGGAGCAGACAAGCCCGTCAGGGCGCGTC | | | |
| | | AGCGGGTGTTGGCGGGTGTCGGGGCTGGCTTAACTATGCGGCATCA | | | |
| | | GAGCAGATTGTACTGAGAGTGCACCATATGCGGTGTGAAATACCGCA | | | |
| | | CAGATGCGTAAGGAGAAAATACCGCATCAGGCGCCATTCGCCATTCA | | | |
| | | GGCTGCGCAACTGTTGGGAAGGGCGATCGGTGCGGGCCTCTTCGCT | | | |
| | | ATTACGCCAGCTGGCGAAAGGGGGATGTGCTGCAAGGCGATTAAGT | | | |
| | | TGGGTAACGCCAGGGTTTTCCCAGTCACGACGTTGTAAAACGACGGC | | | |
| | | CAGT | | | |
| DRIVER_ | PLV10049 | GAATTCGAGCTTGCATGCCTGCAGGTCGTTACATAACTTACGGTAAAT | 317 | N/A | |
| pCMV_R- | | GGCCCGCCTGGCTGACCGCCCAACGACCCCCGCCCATTGACGTCAAT | | | |
| U5- | | AATGACGTATGTTCCCATAGTAACGCCAATAGGGACTTTCCATTGACG | | | |
| MusD6- | | TCAATGGGTGGAGTATTTACGGTAAACTGCCCACTTGGCAGTACATC | | | |
| delPol- | | AAGTGTATCATATGCCAAGTACGCCCCCTATTGACGTCAATGACGGTA | | | |
| LTR_v1 | | AATGGCCCGCCTGGCATTATGCCCAGTACATGACCTTATGGGACTTTC | | | |
| | | CTACTTGGCAGTACATCTACGTATTAGTCATCGCTATTACCATGGTGA | | | |
| | | TGCGGTTTTGGCAGTACATCAATGGGCGTGGATAGCGGTTTGACTCA | | | |
| | | CGGGGATTTCCAAGTCTCCACCCCATTGACGTCAATGGGAGTTTGTTT | | | |
| | | TGGCACCAAAATCAACGGGACTTTCCAAAATGTCGTAACAACTCCGCC | | | |
| | | CCATTGACGCAAATGGGCGGTAGGCGTGTACGGTGGGAGGTCTATA | | | |
| | | TAAGCAGAGCTCGTTTAGTGAACCGTCAGAGCTTTGATCAGAATGAA | | | |
| | | TTTGTCTTGGCTCCGTTTCTTCTTTCGCCCCGTCTAGATTCCTCTCTTAC | | | |
| | | AGCTCGAGTGGCCTTCTCAGTCGAACCGTTCACGTTGCGAGCTGCTG | | | |
| | | GCGGCCGCAACATTTTGGCGCCAGAACTGGGACCTGAAGAATGGCA | | | |
| | | GAGAGATGCTAAGAGGAACGCTGCTTTGGAGCTCCACAGGAAAGGA | | | |
| | | TCTTCGTATCGGACATCGGAGCAACGGACAGGTACACATGCTAGCGC | | | |
| | | TAGCTTAAAATTTCAGTTTTGTAAAGTGTTGCTGAGGATGTGGTAGG | | | |
| | | ATACGAATTAAGCTTGAATCAGTGCTAACCCAACGCTGGTTCTGCTTG | | | |
| | | GGTCAGCAGCGTGTTAATCGGAACTAGAAACGGAAACAGGCAGGTT | | | |
| | | AGCCGCAGCTTTTTAGGAAGCTGCTTAGGTGGAAGAAGAAAGGGTTT | | | |
| | | AAAGTCATGGATCAGGCGGTTGCCCATAGTTTTCAGGAGTTGTTTCA | | | |
| | | GGCCAGAGGAGTAAGGCTTGAAGTACAATTAGTAAAAAATTTTTTAG | | | |
| | | GTAAGATAGATAGCTGTTGCCCATGGTTCAAGGAAGAAGAAACACTA | | | |
| | | GATTGTGGAACCTGGGAGAAAGTTGGTGAGGCCTTAAAAATCACTCA | | | |
| | | GGCAGATAATTTTACCCTAGGCCTCTGGGCACTCATAAATGATGCAAT | | | |
| | | AAAAGATGCCACTTCCCCAGGGCTAAGTTGCCCCCAGGCGGAGCTTG | | | |
| | | TGGTATCTCAGGAGGAGTGCCTGTCAGAGAGGGCCTCCTCAGAAAAA | | | |
| | | GATCTTCTTAACTCAAAAATTGATAAATGTGGAAACTCGGATGAAAA | | | |
| | | ACTGATTTTTAACAAAAATCACTCAGATAGAGGAGCTGCCCATTACCT | | | |
| | | TAATGAGAATTGGTCCTCTTGTGAATCTCCTGCTCAACCTGTAGTCCC | | | |
| | | CACTTCGGGAGGTGCCACTCATAGGGACACACGACTAAGCGAGTTAG | | | |
| | | AGTTTGAGATTAAGCTTCAGAGGCTGACTAATGAGCTTCGGGAACTA | | | |
| | | AAAAAGATGTCAGAAGCGGAGAAGAGTAACTCTTCTGTAGTTCACCA | | | |
| | | GGTGCCGCTAGAAAAGGTTGTGAGTCAGGCTCATGGGAAAGGACAG | | | |
| | | AATATCTCTAATACGCTAGCCTTTCCTGTGGTTGAGGTAGTTGATCAG | | | |
| | | CAAGATACTAGGGGCAGACATTACCAGACCTTAGATTTCAAGTTGAT | | | |
| | | AAAAGAGTTAAAGGCGGCTGTTGTGCAATATGGCCCTTCAGCCCCAT | | | |
| | | TCACTCAAGCATTACTGGACACAGTTGTGGAGTCACACTTAACCCCTT | | | |
| | | TAGATTGGAAGACTCTTTCTAAGGCTACCCTGTCAGGAGGAGATTTTT | | | |
| | | TGCTTTGGGATTCTGAATGGCGAGACGCCAGTAAGAAAACTGCTGCT | | | |
| | | TCTAACGCTCAGGCTGGTAATTCAGACTGGGATAGCAACATGCTTTTA | | | |
| | | GGAGAGGGCCCTTATGAGGGACAGACAAATCAGATTGATTTTCCCGT | | | |
| | | TGCAGTGTACGCGCAAATTGCGACGGCCGCACGCCGTGCTTGGGGA | | | |
| | | AGGTTGCCAGTCAAAGGAGAGATTGGTGGAAGTTTAGCTAGCATTCG | | | |
| | | GCAGAGTTCTGATGAACCATATCAGGATTTTGTGGACAGGCTATTGA | | | |
| | | TTTCAGCTAGTAGAATCCTTGGAAATCCGGACACGGGAAGTCCTTTCG | | | |
| | | TTATGCAATTGGCTTATGAGAATGCTAACGCAATTTGCCGAGCTGCGA | | | |
| | | TTCAACCGCATAAGGGAACGACAGATTTGGCGGGATATGTCCGTCTT | | | |
| | | TGCGCAGACATCGGGCCTTCCTGCGAGACCTTGCAGGGAACCCACGC | | | |
| | | GCAGGCAATGTTCTCTAGGAAACGAGGGAATAGTGCATGCTTTAAAT | | | |
| | | GTGGAAGTTTAGATCATTTTAGAATTGATTGTCCTCAGAACAAGGGC | | | |
| | | GCCGAGGTTAGACAAACAGGCCGTGCCCCGGGAATATGTCCCCGATG | | | |
| | | TGGAAAGGGCCGCCACTGGGCGAAAGATTGCAAGCATAAAACGAGG | | | |
| | | GTTTTGAGCCGCCCGGTGCCGGGAAACGAGGAAAGGGGTCAGCCCC | | | |
| | | AGGCCCCAAGTTACTCAAAGAAGACAGCTTATGGGGCTCTAAATCTG | | | |
| | | CTGCCCAGCCAACAAGATCAGTTCTTGAGCTTGTCAGGTCAAACCCAG | | | |
| | | GAAACGCAAGACTGGACCTCTGTTCCACTGTCCATGCAGCATTAACCC | | | |
| | | CAGAAGTGGGAGTCCAAACTCTGCCTACCGGAGTCTTTGGACCACTA | | | |
| | | CCTGTAGGAACCTGTGGTTTTCTCTTAGGACGAAGCAGTTCTATTGTA | | | |
| | | GAAGGCCTGCAGATTTATCCAGGTGTTATAAGTAATGATTATGAGGG | | | |
| | | AGAAATTAAAATCATAGCCGCTTGCCCTCGTGGTGCTATAACTATACC | | | |
| | | CGCTAATCAGAAAATTGCTCAACTTACCTTGATCCCCTTGCGCTGGTC | | | |
| | | ACTATCTAAATTCTCTAAAAATGAAGAAGGACAGATTAACTTTGACTC | | | |
| | | CTCTGGCGTAAATTGGGTGAAATCTATCACTAATCAGAGACCTAACCT | | | |
| | | TAAATTGATTCTTGATGGAAAAAGCTTTGAAGGATTAATAGATACCG | | | |
| | | GGGCCGATGTAACCATTATTAGAGGGCAGGACTGGCCCTCAAACTGG | | | |
| | | CCCCTGTCTGTTTCCTTGACTCACCTTCAAGGAATTGGTTATGCCAGTA | | | |
| | | ACCCAAAACGTAGTTCCAAATTGCTAACCTGGAGAGATGAGGATGGA | | | |
| | | AAATCAGGAAATATTCAGCCGTATGTTATGCAAAATTTGCCTGTAACC | | | |
| | | CTGTGGGGAAGAGATCTGTTGTCACAGATGGGCGTTATCCTGTGCAG | | | |
| | | TTCTAAGGAAATGGTGACTGAACAGACGTTCAGGCAGGGACCCCTGC | | | |
| | | CTGATCGTGGACTAATAAAGAAGGGACAGAAAATTAAGACTTTTGAA | | | |
| | | GATCTTAAACCCCACTCTAACGTGAGAGGTTTAAAGTATTTTCAGTAG | | | |
| | | TGTAAAATTCCTTTTGTGCTTAAAATTCAGCTGAGAGCAACAGCTCTC | | | |
| | | AAAGCTGTTCTCCAGCTACTCTCTGAGCCAGCTCCCGACAGGAGGCC | | | |
| | | GGAGACTAGCCTCAGCTTTACAATTTGCATTTAAATAAAGTACCTAGA | | | |
| | | CTTCCCCGAAAAAAGTTCTGCTTTTCTACTTTCTCACTGTCTTTCAAGA | | | |
| | | TTTTGTCTTTCAAGCAGGTAAATCAACATTCTCGAGGCGGACCAGCGG | | | |
| | | ATGTGCATCCCCGCCCCCCTAGAGCACTCAGGTGGCAGCTGTTATCCC | | | |
| | | CAGTCTCAGGACATTCCAGCATGTGGCCTTCAGTCTGAGTTAAAAATT | | | |
| | | AGGTTTACCCAGAGGACTAGAATAGTAGATATTTCTATATTAATAAAG | | | |
| | | ATTGGTTTTTATTTTGATAGACAGGCTTAGCCCCTTAGCTGACCTCTG | | | |
| | | GCTTTTCACCCTTGCTGTTACTGCAAGGTGTCTTTAGCTCAATAAGGCT | | | |
| | | GTGGAAAAAAACAGGGATGAGGAGGAACGGCTCCCAGCTCCTATTTT | | | |
| | | AGCCACAAATCGTGGTGTTACTAACGACATAATTCTTGCTTAGGCTTT | | | |
| | | GCTAAATCTGAGGTTGATAATTCTCCTTTAGGAGCTGCACAGCGCTCA | | | |
| | | GAACTGTGCATACTGATTTGTGATGGTACAAATTCAGTATGGGCATC | | | |
| | | GCTTGGTGCAGATGGAGGTACTGCAAGGAAAGGTCCCAGCTTGACC | | | |
| | | ATTTCTGAGTTTCCTGTGAGATAAACCCGGTTTGAAAGAGGTTGGTAC | | | |
| | | CAAATTATATATCCCTCGGCTCTACCTCGCCTCCCCAAAAGGTACCAG | | | |
| | | AGCCACAGGTGTGGATTTTAACAGAATCCACGGGAGGAATCGGGTCC | | | |
| | | ATGTCCACCCAAGCCAAGGTTAAAAGCCCACTCATCTACGGATGAGA | | | |
| | | AAATCATTTGATCACCTCAGTTAAGCGCTGCCTTATTTTAACTTAATTA | | | |
| | | ATAGGGGGGAGAGAGATTGGAGACTTACTATTGAAAGGGCAAGCCC | | | |
| | | TTCACTGCCTCCCACCCAAATAAAAAAGCCAATTGGCCTTGTACTACA | | | |
| | | GAGCTGGCCGGACCCCTTATCCCTGTTACCCACCAATCATCCAAAAAT | | | |
| | | GCGGAGGAATATCAACTTAGTGTTATTCTTATTATAGTGTATTTCACA | | | |
| | | CTTGTTCAGTCAAACTTAGCCAGAGTTCCAACGCCCTACTTAAAATTC | | | |
| | | AACTAGAAAGTTACCTACCAAGTACTAATTAGCATTATAAAGTCAGAG | | | |
| | | CCTACAGCTCCAGGCTTTTCAGTTAGTTGTTTACTAAGATAAGAAAAG | | | |
| | | ACAGTCTTAGCCAGATACAGTTTACCATAATAAAAGTTAAAGAATCCC | | | |
| | | AGGGAAGCAAGTTTTTTCTTTTAGCCCTAGATTCCAGGCAGAACTATT | | | |
| | | GAGCATAGATAATTTTTCCCCCTCAGGCCAGCTTTTTCTTTTTTTTTAAT | | | |
| | | TTTGTTAATAAAAGGGAGGAGATGTAGTCTCCCCTCCCCCAGCCTGAA | | | |
| | | ACCTGCTTGCTCAGGGGTGGAGCTTCCCGCTCATCGCTCTGCCACGCC | | | |
| | | CACTGCTGGAACCTGCGGAGCCACACACGTGCACCTTTCTACTGGACC | | | |
| | | AGAGATTATTCGGCGGGAATCGGGTCCCCTCCCCCTTCCTTCATAACT | | | |
| | | AGTGTCCCAACAATAAAATTTGAGCTTTGATCAGAATGAATTTGTCTT | | | |
| | | GGCTCCGTTTCTTCTTTCGCCCCGTCTAGATTCCTCTCTTACAGCTCGA | | | |
| | | GTGGCCTTCTCAGTCGAACCGTTCACGTTGCGAGCTGCTGGCGGCCG | | | |
| | | CAACAGGGGATCCAGACATGATAAGATACATTGATGAGTTTGGACAA | | | |
| | | ACCACAACTAGAATGCAGTGAAAAAAATGCTTTATTTGTGAAATTTGT | | | |
| | | GATGCTATTGCTTTATTTGTAACCATTATAAGCTGCAATAAACAAGTT | | | |
| | | AACAACAACAATTGCATTCATTTTATGTTTCAGGTTCAGGGGGAGGTG | | | |
| | | TGGGAGGTTTTTTCGGATCCTCTAGAGTCGACCTGCAGGCATGCAAG | | | |
| | | CTTGGCGTAATCATGGTCATAGCTGTTTCCTGTGTGAAATTGTTATCC | | | |
| | | GCTCACAATTCCACACAACATACGAGCCGGAAGCATAAAGTGTAAAG | | | |
| | | CCTGGGGTGCCTAATGAGTGAGCTAACTCACATTAATTGCGTTGCGCT | | | |
| | | CACTGCCCGCTTTCCAGTCGGGAAACCTGTCGTGCCAGCTGCATTAAT | | | |
| | | GAATCGGCCAACGCGCGGGGAGAGGCGGTTTGCGTATTGGGCGCTC | | | |
| | | TTCCGCTTCCTCGCTCACTGACTCGCTGCGCTCGGTCGTTCGGCTGCG | | | |
| | | GCGAGCGGTATCAGCTCACTCAAAGGCGGTAATACGGTTATCCACAG | | | |
| | | AATCAGGGGATAACGCAGGAAAGAACATGTGAGCAAAAGGCCAGCA | | | |
| | | AAAGGCCAGGAACCGTAAAAAGGCCGCGTTGCTGGCGTTTTTCCATA | | | |
| | | GGCTCCGCCCCCCTGACGAGCATCACAAAAATCGACGCTCAAGTCAG | | | |
| | | AGGTGGCGAAACCCGACAGGACTATAAAGATACCAGGCGTTTCCCCC | | | |
| | | TGGAAGCTCCCTCGTGCGCTCTCCTGTTCCGACCCTGCCGCTTACCGG | | | |
| | | ATACCTGTCCGCCTTTCTCCCTTCGGGAAGCGTGGCGCTTTCTCATAG | | | |
| | | CTCACGCTGTAGGTATCTCAGTTCGGTGTAGGTCGTTCGCTCCAAGCT | | | |
| | | GGGCTGTGTGCACGAACCCCCCGTTCAGCCCGACCGCTGCGCCTTATC | | | |
| | | CGGTAACTATCGTCTTGAGTCCAACCCGGTAAGACACGACTTATCGCC | | | |
| | | ACTGGCAGCAGCCACTGGTAACAGGATTAGCAGAGCGAGGTATGTA | | | |
| | | GGCGGTGCTACAGAGTTCTTGAAGTGGTGGCCTAACTACGGCTACAC | | | |
| | | TAGAAGGACAGTATTTGGTATCTGCGCTCTGCTGAAGCCAGTTACCTT | | | |
| | | CGGAAAAAGAGTTGGTAGCTCTTGATCCGGCAAACAAACCACCGCTG | | | |
| | | GTAGCGGTGGTTTTTTTGTTTGCAAGCAGCAGATTACGCGCAGAAAA | | | |
| | | AAAGGATCTCAAGAAGATCCTTTGATCTTTTCTACGGGGTCTGACGCT | | | |
| | | CAGTGGAACGAAAACTCACGTTAAGGGATTTTGGTCATGAGATTATC | | | |
| | | AAAAAGGATCTTCACCTAGATCCTTTTAAATTAAAAATGAAGTTTTAA | | | |
| | | ATCAATCTAAAGTATATATGAGTAAACTTGGTCTGACAGTTACCAATG | | | |
| | | CTTAATCAGTGAGGCACCTATCTCAGCGATCTGTCTATTTCGTTCATCC | | | |
| | | ATAGTTGCCTGACTCCCCGTCGTGTAGATAACTACGATACGGGAGGG | | | |
| | | CTTACCATCTGGCCCCAGTGCTGCAATGATACCGCGAGACCCACGCTC | | | |
| | | ACCGGCTCCAGATTTATCAGCAATAAACCAGCCAGCCGGAAGGGCCG | | | |
| | | AGCGCAGAAGTGGTCCTGCAACTTTATCCGCCTCCATCCAGTCTATTA | | | |
| | | ATTGTTGCCGGGAAGCTAGAGTAAGTAGTTCGCCAGTTAATAGTTTG | | | |
| | | CGCAACGTTGTTGCCATTGCTACAGGCATCGTGGTGTCACGCTCGTCG | | | |
| | | TTTGGTATGGCTTCATTCAGCTCCGGTTCCCAACGATCAAGGCGAGTT | | | |
| | | ACATGATCCCCCATGTTGTGCAAAAAAGCGGTTAGCTCCTTCGGTCCT | | | |
| | | CCGATCGTTGTCAGAAGTAAGTTGGCCGCAGTGTTATCACTCATGGTT | | | |
| | | ATGGCAGCACTGCATAATTCTCTTACTGTCATGCCATCCGTAAGATGC | | | |
| | | TTTTCTGTGACTGGTGAGTACTCAACCAAGTCATTCTGAGAATAGTGT | | | |
| | | ATGCGGCGACCGAGTTGCTCTTGCCCGGCGTCAATACGGGATAATAC | | | |
| | | CGCGCCACATAGCAGAACTTTAAAAGTGCTCATCATTGGAAAACGTTC | | | |
| | | TTCGGGGCGAAAACTCTCAAGGATCTTACCGCTGTTGAGATCCAGTTC | | | |
| | | GATGTAACCCACTCGTGCACCCAACTGATCTTCAGCATCTTTTACTTTC | | | |
| | | ACCAGCGTTTCTGGGTGAGCAAAAACAGGAAGGCAAAATGCCGCAA | | | |
| | | AAAAGGGAATAAGGGCGACACGGAAATGTTGAATACTCATACTCTTC | | | |
| | | CTTTTTCAATATTATTGAAGCATTTATCAGGGTTATTGTCTCATGAGCG | | | |
| | | GATACATATTTGAATGTATTTAGAAAAATAAACAAATAGGGGTTCCG | | | |
| | | CGCACATTTCCCCGAAAAGTGCCACCTGACGTCTAAGAAACCATTATT | | | |
| | | ATCATGACATTAACCTATAAAAATAGGCGTATCACGAGGCCCTTTCGT | | | |
| | | CTCGCGCGTTTCGGTGATGACGGTGAAAACCTCTGACACATGCAGCT | | | |
| | | CCCGGAGACGGTCACAGCTTGTCTGTAAGCGGATGCCGGGAGCAGA | | | |
| | | CAAGCCCGTCAGGGCGCGTCAGCGGGTGTTGGCGGGTGTCGGGGCT | | | |
| | | GGCTTAACTATGCGGCATCAGAGCAGATTGTACTGAGAGTGCACCAT | | | |
| | | ATGCGGTGTGAAATACCGCACAGATGCGTAAGGAGAAAATACCGCA | | | |
| | | TCAGGCGCCATTCGCCATTCAGGCTGCGCAACTGTTGGGAAGGGCGA | | | |
| | | TCGGTGCGGGCCTCTTCGCTATTACGCCAGCTGGCGAAAGGGGGATG | | | |
| | | TGCTGCAAGGCGATTAAGTTGGGTAACGCCAGGGTTTTCCCAGTCAC | | | |
| | | GACGTTGTAAAACGACGGCCAGT | | | |
| DRIVER_ | PLV10050 | GAATTCGAGCTTGCATGCCTGCAGGTCGTTACATAACTTACGGTAAAT | 318 | N/A | |
| pCMV_R- | | GGCCCGCCTGGCTGACCGCCCAACGACCCCCGCCCATTGACGTCAAT | | | |
| U5- | | AATGACGTATGTTCCCATAGTAACGCCAATAGGGACTTTCCATTGACG | | | |
| MusD6- | | TCAATGGGTGGAGTATTTACGGTAAACTGCCCACTTGGCAGTACATC | | | |
| delPol- | | AAGTGTATCATATGCCAAGTACGCCCCCTATTGACGTCAATGACGGTA | | | |
| LTR_v2 | | AATGGCCCGCCTGGCATTATGCCCAGTACATGACCTTATGGGACTTTC | | | |
| | | CTACTTGGCAGTACATCTACGTATTAGTCATCGCTATTACCATGGTGA | | | |
| | | TGCGGTTTTGGCAGTACATCAATGGGCGTGGATAGCGGTTTGACTCA | | | |
| | | CGGGGATTTCCAAGTCTCCACCCCATTGACGTCAATGGGAGTTTGTTT | | | |
| | | TGGCACCAAAATCAACGGGACTTTCCAAAATGTCGTAACAACTCCGCC | | | |
| | | CCATTGACGCAAATGGGCGGTAGGCGTGTACGGTGGGAGGTCTATA | | | |
| | | TAAGCAGAGCTCGTTTAGTGAACCGTCAGCTTTGATCAGAATGAATTT | | | |
| | | GTCTTGGCTCCGTTTCTTCTTTCGCCCCGTCTAGATTCCTCTCTTACAGC | | | |
| | | TCGAGTGGCCTTCTCAGTCGAACCGTTCACGTTGCGAGCTGCTGGCG | | | |
| | | GCCGCAACATTTTGGCGCCAGAACTGGGACCTGAAGAATGGCAGAG | | | |
| | | AGATGCTAAGAGGAACGCTGCTTTGGAGCTCCACAGGAAAGGATCTT | | | |
| | | CGTATCGGACATCGGAGCAACGGACAGGTACACATGCTAGCGCTAGC | | | |
| | | TTAAAATTTCAGTTTTGTAAAGTGTTGCTGAGGATGTGGTAGGATAC | | | |
| | | GAATTAAGCTTGAATCAGTGCTAACCCAACGCTGGTTCTGCTTGGGTC | | | |
| | | AGCAGCGTGTTAATCGGAACTAGAAACGGAAACAGGCAGGTTAGCC | | | |
| | | GCAGCTTTTTAGGAAGCTGCTTAGGTGGAAGAAGAAAGGGTTTAAA | | | |
| | | GTCATGGATCAGGCGGTTGCCCATAGTTTTCAGGAGTTGTTTCAGGC | | | |
| | | CAGAGGAGTAAGGCTTGAAGTACAATTAGTAAAAAATTTTTTAGGTA | | | |
| | | AGATAGATAGCTGTTGCCCATGGTTCAAGGAAGAAGAAACACTAGAT | | | |
| | | TGTGGAACCTGGGAGAAAGTTGGTGAGGCCTTAAAAATCACTCAGGC | | | |
| | | AGATAATTTTACCCTAGGCCTCTGGGCACTCATAAATGATGCAATAAA | | | |
| | | AGATGCCACTTCCCCAGGGCTAAGTTGCCCCCAGGCGGAGCTTGTGG | | | |
| | | TATCTCAGGAGGAGTGCCTGTCAGAGAGGGCCTCCTCAGAAAAAGAT | | | |
| | | CTTCTTAACTCAAAAATTGATAAATGTGGAAACTCGGATGAAAAACTG | | | |
| | | ATTTTTAACAAAAATCACTCAGATAGAGGAGCTGCCCATTACCTTAAT | | | |
| | | GAGAATTGGTCCTCTTGTGAATCTCCTGCTCAACCTGTAGTCCCCACTT | | | |
| | | CGGGAGGTGCCACTCATAGGGACACACGACTAAGCGAGTTAGAGTTT | | | |
| | | GAGATTAAGCTTCAGAGGCTGACTAATGAGCTTCGGGAACTAAAAAA | | | |
| | | GATGTCAGAAGCGGAGAAGAGTAACTCTTCTGTAGTTCACCAGGTGC | | | |
| | | CGCTAGAAAAGGTTGTGAGTCAGGCTCATGGGAAAGGACAGAATAT | | | |
| | | CTCTAATACGCTAGCCTTTCCTGTGGTTGAGGTAGTTGATCAGCAAGA | | | |
| | | TACTAGGGGCAGACATTACCAGACCTTAGATTTCAAGTTGATAAAAG | | | |
| | | AGTTAAAGGCGGCTGTTGTGCAATATGGCCCTTCAGCCCCATTCACTC | | | |
| | | AAGCATTACTGGACACAGTTGTGGAGTCACACTTAACCCCTTTAGATT | | | |
| | | GGAAGACTCTTTCTAAGGCTACCCTGTCAGGAGGAGATTTTTTGCTTT | | | |
| | | GGGATTCTGAATGGCGAGACGCCAGTAAGAAAACTGCTGCTTCTAAC | | | |
| | | GCTCAGGCTGGTAATTCAGACTGGGATAGCAACATGCTTTTAGGAGA | | | |
| | | GGGCCCTTATGAGGGACAGACAAATCAGATTGATTTTCCCGTTGCAG | | | |
| | | TGTACGCGCAAATTGCGACGGCCGCACGCCGTGCTTGGGGAAGGTT | | | |
| | | GCCAGTCAAAGGAGAGATTGGTGGAAGTTTAGCTAGCATTCGGCAG | | | |
| | | AGTTCTGATGAACCATATCAGGATTTTGTGGACAGGCTATTGATTTCA | | | |
| | | GCTAGTAGAATCCTTGGAAATCCGGACACGGGAAGTCCTTTCGTTAT | | | |
| | | GCAATTGGCTTATGAGAATGCTAACGCAATTTGCCGAGCTGCGATTC | | | |
| | | AACCGCATAAGGGAACGACAGATTTGGCGGGATATGTCCGTCTTTGC | | | |
| | | GCAGACATCGGGCCTTCCTGCGAGACCTTGCAGGGAACCCACGCGCA | | | |
| | | GGCAATGTTCTCTAGGAAACGAGGGAATAGTGCATGCTTTAAATGTG | | | |
| | | GAAGTTTAGATCATTTTAGAATTGATTGTCCTCAGAACAAGGGCGCC | | | |
| | | GAGGTTAGACAAACAGGCCGTGCCCCGGGAATATGTCCCCGATGTG | | | |
| | | GAAAGGGCCGCCACTGGGCGAAAGATTGCAAGCATAAAACGAGGGT | | | |
| | | TTTGAGCCGCCCGGTGCCGGGAAACGAGGAAAGGGGTCAGCCCCAG | | | |
| | | GCCCCAAGTTACTCAAAGAAGACAGCTTATGGGGCTCTAAATCTGCT | | | |
| | | GCCCAGCCAACAAGATCAGTTCTTGAGCTTGTCAGGTCAAACCCAGG | | | |
| | | AAACGCAAGACTGGACCTCTGTTCCACTGTCCATGCAGCATTAACCCC | | | |
| | | AGAAGTGGGAGTCCAAACTCTGCCTACCGGAGTCTTTGGACCACTAC | | | |
| | | CTGTAGGAACCTGTGGTTTTCTCTTAGGACGAAGCAGTTCTATTGTAG | | | |
| | | AAGGCCTGCAGATTTATCCAGGTGTTATAAGTAATGATTATGAGGGA | | | |
| | | GAAATTAAAATCATAGCCGCTTGCCCTCGTGGTGCTATAACTATACCC | | | |
| | | GCTAATCAGAAAATTGCTCAACTTACCTTGATCCCCTTGCGCTGGTCA | | | |
| | | CTATCTAAATTCTCTAAAAATGAAGAAGGACAGATTAACTTTGACTCC | | | |
| | | TCTGGCGTAAATTGGGTGAAATCTATCACTAATCAGAGACCTAACCTT | | | |
| | | AAATTGATTCTTGATGGAAAAAGCTTTGAAGGATTAATAGATACCGG | | | |
| | | GGCCGATGTAACCATTATTAGAGGGCAGGACTGGCCCTCAAACTGGC | | | |
| | | CCCTGTCTGTTTCCTTGACTCACCTTCAAGGAATTGGTTATGCCAGTAA | | | |
| | | CCCAAAACGTAGTTCCAAATTGCTAACCTGGAGAGATGAGGATGGAA | | | |
| | | AATCAGGAAATATTCAGCCGTATGTTATGCAAAATTTGCCTGTAACCC | | | |
| | | TGTGGGGAAGAGATCTGTTGTCACAGATGGGCGTTATCCTGTGCAGT | | | |
| | | TCTAAGGAAATGGTGACTGAACAGACGTTCAGGCAGGGACCCCTGCC | | | |
| | | TGATCGTGGACTAATAAAGAAGGGACAGAAAATTAAGACTTTTGAAG | | | |
| | | ATCTTAAACCCCACTCTAACGTGAGAGGTTTAAAGTATTTTCAGTAGT | | | |
| | | GTAAAATTCCTTTTGTGCTTAAAATTCAGCTGAGAGCAACAGCTCTCA | | | |
| | | AAGCTGTTCTCCAGCTACTCTCTGAGCCAGCTCCCGACAGGAGGCCG | | | |
| | | GAGACTAGCCTCAGCTTTACAATTTGCATTTAAATAAAGTACCTAGAC | | | |
| | | TTCCCCGAAAAAAGTTCTGCTTTTCTACTTTCTCACTGTCTTTCAAGATT | | | |
| | | TTGTCTTTCAAGCAGGTAAATCAACATTCTCGAGGCGGACCAGCGGA | | | |
| | | TGTGCATCCCCGCCCCCCTAGAGCACTCAGGTGGCAGCTGTTATCCCC | | | |
| | | AGTCTCAGGACATTCCAGCATGTGGCCTTCAGTCTGAGTTAAAAATTA | | | |
| | | GGTTTACCCAGAGGACTAGAATAGTAGATATTTCTATATTAATAAAGA | | | |
| | | TTGGTTTTTATTTTGATAGACAGGCTTAGCCCCTTAGCTGACCTCTGGC | | | |
| | | TTTTCACCCTTGCTGTTACTGCAAGGTGTCTTTAGCTCAATAAGGCTGT | | | |
| | | GGAAAAAAACAGGGATGAGGAGGAACGGCTCCCAGCTCCTATTTTA | | | |
| | | GCCACAAATCGTGGTGTTACTAACGACATAATTCTTGCTTAGGCTTTG | | | |
| | | CTAAATCTGAGGTTGATAATTCTCCTTTAGGAGCTGCACAGCGCTCAG | | | |
| | | AACTGTGCATACTGATTTGTGATGGTACAAATTCAGTATGGGCATCGC | | | |
| | | TTGGTGCAGATGGAGGTACTGCAAGGAAAGGTCCCAGCTTGACCATT | | | |
| | | TCTGAGTTTCCTGTGAGATAAACCCGGTTTGAAAGAGGTTGGTACCA | | | |
| | | AATTATATATCCCTCGGCTCTACCTCGCCTCCCCAAAAGGTACCAGAG | | | |
| | | CCACAGGTGTGGATTTTAACAGAATCCACGGGAGGAATCGGGTCCAT | | | |
| | | GTCCACCCAAGCCAAGGTTAAAAGCCCACTCATCTACGGATGAGAAA | | | |
| | | ATCATTTGATCACCTCAGTTAAGCGCTGCCTTATTTTAACTTAATTAAT | | | |
| | | AGGGGGGAGAGAGATTGGAGACTTACTATTGAAAGGGCAAGCCCTT | | | |
| | | CACTGCCTCCCACCCAAATAAAAAAGCCAATTGGCCTTGTACTACAGA | | | |
| | | GCTGGCCGGACCCCTTATCCCTGTTACCCACCAATCATCCAAAAATGC | | | |
| | | GGAGGAATATCAACTTAGTGTTATTCTTATTATAGTGTATTTCACACTT | | | |
| | | GTTCAGTCAAACTTAGCCAGAGTTCCAACGCCCTACTTAAAATTCAAC | | | |
| | | TAGAAAGTTACCTACCAAGTACTAATTAGCATTATAAAGTCAGAGCCT | | | |
| | | ACAGCTCCAGGCTTTTCAGTTAGTTGTTTACTAAGATAAGAAAAGACA | | | |
| | | GTCTTAGCCAGATACAGTTTACCATAATAAAAGTTAAAGAATCCCAGG | | | |
| | | GAAGCAAGTTTTTTCTTTTAGCCCTAGATTCCAGGCAGAACTATTGAG | | | |
| | | CATAGATAATTTTTCCCCCTCAGGCCAGCTTTTTCTTTTTTTTTAATTTT | | | |
| | | GTTAATAAAAGGGAGGAGATGTAGTCTCCCCTCCCCCAGCCTGAAAC | | | |
| | | CTGCTTGCTCAGGGGTGGAGCTTCCCGCTCATCGCTCTGCCACGCCCA | | | |
| | | CTGCTGGAACCTGCGGAGCCACACACGTGCACCTTTCTACTGGACCA | | | |
| | | GAGATTATTCGGCGGGAATCGGGTCCCCTCCCCCTTCCTTCATAACTA | | | |
| | | GTGTCCCAACAATAAAATTTGAGCTTTGATCAGAATGAATTTGTCTTG | | | |
| | | GCTCCGTTTCTTCTTTCGCCCCGTCTAGATTCCTCTCTTACAGCTCGAG | | | |
| | | TGGCCTTCTCAGTCGAACCGTTCACGTTGCGAGCTGCTGGCGGCCGC | | | |
| | | AACAGGGGATCCAGACATGATAAGATACATTGATGAGTTTGGACAAA | | | |
| | | CCACAACTAGAATGCAGTGAAAAAAATGCTTTATTTGTGAAATTTGTG | | | |
| | | ATGCTATTGCTTTATTTGTAACCATTATAAGCTGCAATAAACAAGTTAA | | | |
| | | CAACAACAATTGCATTCATTTTATGTTTCAGGTTCAGGGGGAGGTGTG | | | |
| | | GGAGGTTTTTTCGGATCCTCTAGAGTCGACCTGCAGGCATGCAAGCT | | | |
| | | TGGCGTAATCATGGTCATAGCTGTTTCCTGTGTGAAATTGTTATCCGC | | | |
| | | TCACAATTCCACACAACATACGAGCCGGAAGCATAAAGTGTAAAGCC | | | |
| | | TGGGGTGCCTAATGAGTGAGCTAACTCACATTAATTGCGTTGCGCTCA | | | |
| | | CTGCCCGCTTTCCAGTCGGGAAACCTGTCGTGCCAGCTGCATTAATGA | | | |
| | | ATCGGCCAACGCGCGGGGAGAGGCGGTTTGCGTATTGGGCGCTCTT | | | |
| | | CCGCTTCCTCGCTCACTGACTCGCTGCGCTCGGTCGTTCGGCTGCGGC | | | |
| | | GAGCGGTATCAGCTCACTCAAAGGCGGTAATACGGTTATCCACAGAA | | | |
| | | TCAGGGGATAACGCAGGAAAGAACATGTGAGCAAAAGGCCAGCAAA | | | |
| | | AGGCCAGGAACCGTAAAAAGGCCGCGTTGCTGGCGTTTTTCCATAGG | | | |
| | | CTCCGCCCCCCTGACGAGCATCACAAAAATCGACGCTCAAGTCAGAG | | | |
| | | GTGGCGAAACCCGACAGGACTATAAAGATACCAGGCGTTTCCCCCTG | | | |
| | | GAAGCTCCCTCGTGCGCTCTCCTGTTCCGACCCTGCCGCTTACCGGAT | | | |
| | | ACCTGTCCGCCTTTCTCCCTTCGGGAAGCGTGGCGCTTTCTCATAGCT | | | |
| | | CACGCTGTAGGTATCTCAGTTCGGTGTAGGTCGTTCGCTCCAAGCTG | | | |
| | | GGCTGTGTGCACGAACCCCCCGTTCAGCCCGACCGCTGCGCCTTATCC | | | |
| | | GGTAACTATCGTCTTGAGTCCAACCCGGTAAGACACGACTTATCGCCA | | | |
| | | CTGGCAGCAGCCACTGGTAACAGGATTAGCAGAGCGAGGTATGTAG | | | |
| | | GCGGTGCTACAGAGTTCTTGAAGTGGTGGCCTAACTACGGCTACACT | | | |
| | | AGAAGGACAGTATTTGGTATCTGCGCTCTGCTGAAGCCAGTTACCTTC | | | |
| | | GGAAAAAGAGTTGGTAGCTCTTGATCCGGCAAACAAACCACCGCTGG | | | |
| | | TAGCGGTGGTTTTTTTGTTTGCAAGCAGCAGATTACGCGCAGAAAAA | | | |
| | | AAGGATCTCAAGAAGATCCTTTGATCTTTTCTACGGGGTCTGACGCTC | | | |
| | | AGTGGAACGAAAACTCACGTTAAGGGATTTTGGTCATGAGATTATCA | | | |
| | | AAAAGGATCTTCACCTAGATCCTTTTAAATTAAAAATGAAGTTTTAAA | | | |
| | | TCAATCTAAAGTATATATGAGTAAACTTGGTCTGACAGTTACCAATGC | | | |
| | | TTAATCAGTGAGGCACCTATCTCAGCGATCTGTCTATTTCGTTCATCCA | | | |
| | | TAGTTGCCTGACTCCCCGTCGTGTAGATAACTACGATACGGGAGGGC | | | |
| | | TTACCATCTGGCCCCAGTGCTGCAATGATACCGCGAGACCCACGCTCA | | | |
| | | CCGGCTCCAGATTTATCAGCAATAAACCAGCCAGCCGGAAGGGCCGA | | | |
| | | GCGCAGAAGTGGTCCTGCAACTTTATCCGCCTCCATCCAGTCTATTAA | | | |
| | | TTGTTGCCGGGAAGCTAGAGTAAGTAGTTCGCCAGTTAATAGTTTGC | | | |
| | | GCAACGTTGTTGCCATTGCTACAGGCATCGTGGTGTCACGCTCGTCGT | | | |
| | | TTGGTATGGCTTCATTCAGCTCCGGTTCCCAACGATCAAGGCGAGTTA | | | |
| | | CATGATCCCCCATGTTGTGCAAAAAAGCGGTTAGCTCCTTCGGTCCTC | | | |
| | | CGATCGTTGTCAGAAGTAAGTTGGCCGCAGTGTTATCACTCATGGTTA | | | |
| | | TGGCAGCACTGCATAATTCTCTTACTGTCATGCCATCCGTAAGATGCT | | | |
| | | TTTCTGTGACTGGTGAGTACTCAACCAAGTCATTCTGAGAATAGTGTA | | | |
| | | TGCGGCGACCGAGTTGCTCTTGCCCGGCGTCAATACGGGATAATACC | | | |
| | | GCGCCACATAGCAGAACTTTAAAAGTGCTCATCATTGGAAAACGTTCT | | | |
| | | TCGGGGCGAAAACTCTCAAGGATCTTACCGCTGTTGAGATCCAGTTC | | | |
| | | GATGTAACCCACTCGTGCACCCAACTGATCTTCAGCATCTTTTACTTTC | | | |
| | | ACCAGCGTTTCTGGGTGAGCAAAAACAGGAAGGCAAAATGCCGCAA | | | |
| | | AAAAGGGAATAAGGGCGACACGGAAATGTTGAATACTCATACTCTTC | | | |
| | | CTTTTTCAATATTATTGAAGCATTTATCAGGGTTATTGTCTCATGAGCG | | | |
| | | GATACATATTTGAATGTATTTAGAAAAATAAACAAATAGGGGTTCCG | | | |
| | | CGCACATTTCCCCGAAAAGTGCCACCTGACGTCTAAGAAACCATTATT | | | |
| | | ATCATGACATTAACCTATAAAAATAGGCGTATCACGAGGCCCTTTCGT | | | |
| | | CTCGCGCGTTTCGGTGATGACGGTGAAAACCTCTGACACATGCAGCT | | | |
| | | CCCGGAGACGGTCACAGCTTGTCTGTAAGCGGATGCCGGGAGCAGA | | | |
| | | CAAGCCCGTCAGGGCGCGTCAGCGGGTGTTGGCGGGTGTCGGGGCT | | | |
| | | GGCTTAACTATGCGGCATCAGAGCAGATTGTACTGAGAGTGCACCAT | | | |
| | | ATGCGGTGTGAAATACCGCACAGATGCGTAAGGAGAAAATACCGCA | | | |
| | | TCAGGCGCCATTCGCCATTCAGGCTGCGCAACTGTTGGGAAGGGCGA | | | |
| | | TCGGTGCGGGCCTCTTCGCTATTACGCCAGCTGGCGAAAGGGGGATG | | | |
| | | TGCTGCAAGGCGATTAAGTTGGGTAACGCCAGGGTTTTCCCAGTCAC | | | |
| | | GACGTTGTAAAACGACGGCCAGT | | | |
| DRIVER_ | PLV10051 | GAATTCGAGCTTGCATGCCTGCAGGTCGTTACATAACTTACGGTAAAT | 319 | N/A | |
| pCMV_R- | | GGCCCGCCTGGCTGACCGCCCAACGACCCCCGCCCATTGACGTCAAT | | | |
| U5- | | AATGACGTATGTTCCCATAGTAACGCCAATAGGGACTTTCCATTGACG | | | |
| MusD6- | | TCAATGGGTGGAGTATTTACGGTAAACTGCCCACTTGGCAGTACATC | | | |
| delPol- | | AAGTGTATCATATGCCAAGTACGCCCCCTATTGACGTCAATGACGGTA | | | |
| LTR_v3 | | AATGGCCCGCCTGGCATTATGCCCAGTACATGACCTTATGGGACTTTC | | | |
| | | CTACTTGGCAGTACATCTACGTATTAGTCATCGCTATTACCATGGTGA | | | |
| | | TGCGGTTTTGGCAGTACATCAATGGGCGTGGATAGCGGTTTGACTCA | | | |
| | | CGGGGATTTCCAAGTCTCCACCCCATTGACGTCAATGGGAGTTTGTTT | | | |
| | | TGGCACCAAAATCAACGGGACTTTCCAAAATGTCGTAACAACTCCGCC | | | |
| | | CCATTGACGCAAATGGGCGGTAGGCGTGTACGGTGGGAGGTCTATA | | | |
| | | TAAGCAGAGCTGAGCTTTGATCAGAATGAATTTGTCTTGGCTCCGTTT | | | |
| | | CTTCTTTCGCCCCGTCTAGATTCCTCTCTTACAGCTCGAGTGGCCTTCT | | | |
| | | CAGTCGAACCGTTCACGTTGCGAGCTGCTGGCGGCCGCAACATTTTG | | | |
| | | GCGCCAGAACTGGGACCTGAAGAATGGCAGAGAGATGCTAAGAGGA | | | |
| | | ACGCTGCTTTGGAGCTCCACAGGAAAGGATCTTCGTATCGGACATCG | | | |
| | | GAGCAACGGACAGGTACACATGCTAGCGCTAGCTTAAAATTTCAGTT | | | |
| | | TTGTAAAGTGTTGCTGAGGATGTGGTAGGATACGAATTAAGCTTGAA | | | |
| | | TCAGTGCTAACCCAACGCTGGTTCTGCTTGGGTCAGCAGCGTGTTAAT | | | |
| | | CGGAACTAGAAACGGAAACAGGCAGGTTAGCCGCAGCTTTTTAGGA | | | |
| | | AGCTGCTTAGGTGGAAGAAGAAAGGGTTTAAAGTCATGGATCAGGC | | | |
| | | GGTTGCCCATAGTTTTCAGGAGTTGTTTCAGGCCAGAGGAGTAAGGC | | | |
| | | TTGAAGTACAATTAGTAAAAAATTTTTTAGGTAAGATAGATAGCTGTT | | | |
| | | GCCCATGGTTCAAGGAAGAAGAAACACTAGATTGTGGAACCTGGGA | | | |
| | | GAAAGTTGGTGAGGCCTTAAAAATCACTCAGGCAGATAATTTTACCCT | | | |
| | | AGGCCTCTGGGCACTCATAAATGATGCAATAAAAGATGCCACTTCCCC | | | |
| | | AGGGCTAAGTTGCCCCCAGGCGGAGCTTGTGGTATCTCAGGAGGAG | | | |
| | | TGCCTGTCAGAGAGGGCCTCCTCAGAAAAAGATCTTCTTAACTCAAAA | | | |
| | | ATTGATAAATGTGGAAACTCGGATGAAAAACTGATTTTTAACAAAAA | | | |
| | | TCACTCAGATAGAGGAGCTGCCCATTACCTTAATGAGAATTGGTCCTC | | | |
| | | TTGTGAATCTCCTGCTCAACCTGTAGTCCCCACTTCGGGAGGTGCCAC | | | |
| | | TCATAGGGACACACGACTAAGCGAGTTAGAGTTTGAGATTAAGCTTC | | | |
| | | AGAGGCTGACTAATGAGCTTCGGGAACTAAAAAAGATGTCAGAAGC | | | |
| | | GGAGAAGAGTAACTCTTCTGTAGTTCACCAGGTGCCGCTAGAAAAGG | | | |
| | | TTGTGAGTCAGGCTCATGGGAAAGGACAGAATATCTCTAATACGCTA | | | |
| | | GCCTTTCCTGTGGTTGAGGTAGTTGATCAGCAAGATACTAGGGGCAG | | | |
| | | ACATTACCAGACCTTAGATTTCAAGTTGATAAAAGAGTTAAAGGCGG | | | |
| | | CTGTTGTGCAATATGGCCCTTCAGCCCCATTCACTCAAGCATTACTGG | | | |
| | | ACACAGTTGTGGAGTCACACTTAACCCCTTTAGATTGGAAGACTCTTT | | | |
| | | CTAAGGCTACCCTGTCAGGAGGAGATTTTTTGCTTTGGGATTCTGAAT | | | |
| | | GGCGAGACGCCAGTAAGAAAACTGCTGCTTCTAACGCTCAGGCTGGT | | | |
| | | AATTCAGACTGGGATAGCAACATGCTTTTAGGAGAGGGCCCTTATGA | | | |
| | | GGGACAGACAAATCAGATTGATTTTCCCGTTGCAGTGTACGCGCAAA | | | |
| | | TTGCGACGGCCGCACGCCGTGCTTGGGGAAGGTTGCCAGTCAAAGG | | | |
| | | AGAGATTGGTGGAAGTTTAGCTAGCATTCGGCAGAGTTCTGATGAAC | | | |
| | | CATATCAGGATTTTGTGGACAGGCTATTGATTTCAGCTAGTAGAATCC | | | |
| | | TTGGAAATCCGGACACGGGAAGTCCTTTCGTTATGCAATTGGCTTATG | | | |
| | | AGAATGCTAACGCAATTTGCCGAGCTGCGATTCAACCGCATAAGGGA | | | |
| | | ACGACAGATTTGGCGGGATATGTCCGTCTTTGCGCAGACATCGGGCC | | | |
| | | TTCCTGCGAGACCTTGCAGGGAACCCACGCGCAGGCAATGTTCTCTA | | | |
| | | GGAAACGAGGGAATAGTGCATGCTTTAAATGTGGAAGTTTAGATCAT | | | |
| | | TTTAGAATTGATTGTCCTCAGAACAAGGGCGCCGAGGTTAGACAAAC | | | |
| | | AGGCCGTGCCCCGGGAATATGTCCCCGATGTGGAAAGGGCCGCCACT | | | |
| | | GGGCGAAAGATTGCAAGCATAAAACGAGGGTTTTGAGCCGCCCGGT | | | |
| | | GCCGGGAAACGAGGAAAGGGGTCAGCCCCAGGCCCCAAGTTACTCA | | | |
| | | AAGAAGACAGCTTATGGGGCTCTAAATCTGCTGCCCAGCCAACAAGA | | | |
| | | TCAGTTCTTGAGCTTGTCAGGTCAAACCCAGGAAACGCAAGACTGGA | | | |
| | | CCTCTGTTCCACTGTCCATGCAGCATTAACCCCAGAAGTGGGAGTCCA | | | |
| | | AACTCTGCCTACCGGAGTCTTTGGACCACTACCTGTAGGAACCTGTGG | | | |
| | | TTTTCTCTTAGGACGAAGCAGTTCTATTGTAGAAGGCCTGCAGATTTA | | | |
| | | TCCAGGTGTTATAAGTAATGATTATGAGGGAGAAATTAAAATCATAG | | | |
| | | CCGCTTGCCCTCGTGGTGCTATAACTATACCCGCTAATCAGAAAATTG | | | |
| | | CTCAACTTACCTTGATCCCCTTGCGCTGGTCACTATCTAAATTCTCTAA | | | |
| | | AAATGAAGAAGGACAGATTAACTTTGACTCCTCTGGCGTAAATTGGG | | | |
| | | TGAAATCTATCACTAATCAGAGACCTAACCTTAAATTGATTCTTGATG | | | |
| | | GAAAAAGCTTTGAAGGATTAATAGATACCGGGGCCGATGTAACCATT | | | |
| | | ATTAGAGGGCAGGACTGGCCCTCAAACTGGCCCCTGTCTGTTTCCTTG | | | |
| | | ACTCACCTTCAAGGAATTGGTTATGCCAGTAACCCAAAACGTAGTTCC | | | |
| | | AAATTGCTAACCTGGAGAGATGAGGATGGAAAATCAGGAAATATTCA | | | |
| | | GCCGTATGTTATGCAAAATTTGCCTGTAACCCTGTGGGGAAGAGATC | | | |
| | | TGTTGTCACAGATGGGCGTTATCCTGTGCAGTTCTAAGGAAATGGTG | | | |
| | | ACTGAACAGACGTTCAGGCAGGGACCCCTGCCTGATCGTGGACTAAT | | | |
| | | AAAGAAGGGACAGAAAATTAAGACTTTTGAAGATCTTAAACCCCACT | | | |
| | | CTAACGTGAGAGGTTTAAAGTATTTTCAGTAGTGTAAAATTCCTTTTG | | | |
| | | TGCTTAAAATTCAGCTGAGAGCAACAGCTCTCAAAGCTGTTCTCCAGC | | | |
| | | TACTCTCTGAGCCAGCTCCCGACAGGAGGCCGGAGACTAGCCTCAGC | | | |
| | | TTTACAATTTGCATTTAAATAAAGTACCTAGACTTCCCCGAAAAAAGT | | | |
| | | TCTGCTTTTCTACTTTCTCACTGTCTTTCAAGATTTTGTCTTTCAAGCAG | | | |
| | | GTAAATCAACATTCTCGAGGCGGACCAGCGGATGTGCATCCCCGCCC | | | |
| | | CCCTAGAGCACTCAGGTGGCAGCTGTTATCCCCAGTCTCAGGACATTC | | | |
| | | CAGCATGTGGCCTTCAGTCTGAGTTAAAAATTAGGTTTACCCAGAGG | | | |
| | | ACTAGAATAGTAGATATTTCTATATTAATAAAGATTGGTTTTTATTTTG | | | |
| | | ATAGACAGGCTTAGCCCCTTAGCTGACCTCTGGCTTTTCACCCTTGCT | | | |
| | | GTTACTGCAAGGTGTCTTTAGCTCAATAAGGCTGTGGAAAAAAACAG | | | |
| | | GGATGAGGAGGAACGGCTCCCAGCTCCTATTTTAGCCACAAATCGTG | | | |
| | | GTGTTACTAACGACATAATTCTTGCTTAGGCTTTGCTAAATCTGAGGT | | | |
| | | TGATAATTCTCCTTTAGGAGCTGCACAGCGCTCAGAACTGTGCATACT | | | |
| | | GATTTGTGATGGTACAAATTCAGTATGGGCATCGCTTGGTGCAGATG | | | |
| | | GAGGTACTGCAAGGAAAGGTCCCAGCTTGACCATTTCTGAGTTTCCT | | | |
| | | GTGAGATAAACCCGGTTTGAAAGAGGTTGGTACCAAATTATATATCC | | | |
| | | CTCGGCTCTACCTCGCCTCCCCAAAAGGTACCAGAGCCACAGGTGTG | | | |
| | | GATTTTAACAGAATCCACGGGAGGAATCGGGTCCATGTCCACCCAAG | | | |
| | | CCAAGGTTAAAAGCCCACTCATCTACGGATGAGAAAATCATTTGATCA | | | |
| | | CCTCAGTTAAGCGCTGCCTTATTTTAACTTAATTAATAGGGGGGAGAG | | | |
| | | AGATTGGAGACTTACTATTGAAAGGGCAAGCCCTTCACTGCCTCCCAC | | | |
| | | CCAAATAAAAAAGCCAATTGGCCTTGTACTACAGAGCTGGCCGGACC | | | |
| | | CCTTATCCCTGTTACCCACCAATCATCCAAAAATGCGGAGGAATATCA | | | |
| | | ACTTAGTGTTATTCTTATTATAGTGTATTTCACACTTGTTCAGTCAAAC | | | |
| | | TTAGCCAGAGTTCCAACGCCCTACTTAAAATTCAACTAGAAAGTTACC | | | |
| | | TACCAAGTACTAATTAGCATTATAAAGTCAGAGCCTACAGCTCCAGGC | | | |
| | | TTTTCAGTTAGTTGTTTACTAAGATAAGAAAAGACAGTCTTAGCCAGA | | | |
| | | TACAGTTTACCATAATAAAAGTTAAAGAATCCCAGGGAAGCAAGTTTT | | | |
| | | TTCTTTTAGCCCTAGATTCCAGGCAGAACTATTGAGCATAGATAATTTT | | | |
| | | TCCCCCTCAGGCCAGCTTTTTCTTTTTTTTTAATTTTGTTAATAAAAGG | | | |
| | | GAGGAGATGTAGTCTCCCCTCCCCCAGCCTGAAACCTGCTTGCTCAGG | | | |
| | | GGTGGAGCTTCCCGCTCATCGCTCTGCCACGCCCACTGCTGGAACCTG | | | |
| | | CGGAGCCACACACGTGCACCTTTCTACTGGACCAGAGATTATTCGGC | | | |
| | | GGGAATCGGGTCCCCTCCCCCTTCCTTCATAACTAGTGTCCCAACAAT | | | |
| | | AAAATTTGAGCTTTGATCAGAATGAATTTGTCTTGGCTCCGTTTCTTCT | | | |
| | | TTCGCCCCGTCTAGATTCCTCTCTTACAGCTCGAGTGGCCTTCTCAGTC | | | |
| | | GAACCGTTCACGTTGCGAGCTGCTGGCGGCCGCAACAGGGGATCCA | | | |
| | | GACATGATAAGATACATTGATGAGTTTGGACAAACCACAACTAGAAT | | | |
| | | GCAGTGAAAAAAATGCTTTATTTGTGAAATTTGTGATGCTATTGCTTT | | | |
| | | ATTTGTAACCATTATAAGCTGCAATAAACAAGTTAACAACAACAATTG | | | |
| | | CATTCATTTTATGTTTCAGGTTCAGGGGGAGGTGTGGGAGGTTTTTTC | | | |
| | | GGATCCTCTAGAGTCGACCTGCAGGCATGCAAGCTTGGCGTAATCAT | | | |
| | | GGTCATAGCTGTTTCCTGTGTGAAATTGTTATCCGCTCACAATTCCAC | | | |
| | | ACAACATACGAGCCGGAAGCATAAAGTGTAAAGCCTGGGGTGCCTA | | | |
| | | ATGAGTGAGCTAACTCACATTAATTGCGTTGCGCTCACTGCCCGCTTT | | | |
| | | CCAGTCGGGAAACCTGTCGTGCCAGCTGCATTAATGAATCGGCCAAC | | | |
| | | GCGCGGGGAGAGGCGGTTTGCGTATTGGGCGCTCTTCCGCTTCCTCG | | | |
| | | CTCACTGACTCGCTGCGCTCGGTCGTTCGGCTGCGGCGAGCGGTATC | | | |
| | | AGCTCACTCAAAGGCGGTAATACGGTTATCCACAGAATCAGGGGATA | | | |
| | | ACGCAGGAAAGAACATGTGAGCAAAAGGCCAGCAAAAGGCCAGGA | | | |
| | | ACCGTAAAAAGGCCGCGTTGCTGGCGTTTTTCCATAGGCTCCGCCCCC | | | |
| | | CTGACGAGCATCACAAAAATCGACGCTCAAGTCAGAGGTGGCGAAA | | | |
| | | CCCGACAGGACTATAAAGATACCAGGCGTTTCCCCCTGGAAGCTCCCT | | | |
| | | CGTGCGCTCTCCTGTTCCGACCCTGCCGCTTACCGGATACCTGTCCGC | | | |
| | | CTTTCTCCCTTCGGGAAGCGTGGCGCTTTCTCATAGCTCACGCTGTAG | | | |
| | | GTATCTCAGTTCGGTGTAGGTCGTTCGCTCCAAGCTGGGCTGTGTGC | | | |
| | | ACGAACCCCCCGTTCAGCCCGACCGCTGCGCCTTATCCGGTAACTATC | | | |
| | | GTCTTGAGTCCAACCCGGTAAGACACGACTTATCGCCACTGGCAGCA | | | |
| | | GCCACTGGTAACAGGATTAGCAGAGCGAGGTATGTAGGCGGTGCTA | | | |
| | | CAGAGTTCTTGAAGTGGTGGCCTAACTACGGCTACACTAGAAGGACA | | | |
| | | GTATTTGGTATCTGCGCTCTGCTGAAGCCAGTTACCTTCGGAAAAAGA | | | |
| | | GTTGGTAGCTCTTGATCCGGCAAACAAACCACCGCTGGTAGCGGTGG | | | |
| | | TTTTTTTGTTTGCAAGCAGCAGATTACGCGCAGAAAAAAAGGATCTCA | | | |
| | | AGAAGATCCTTTGATCTTTTCTACGGGGTCTGACGCTCAGTGGAACGA | | | |
| | | AAACTCACGTTAAGGGATTTTGGTCATGAGATTATCAAAAAGGATCTT | | | |
| | | CACCTAGATCCTTTTAAATTAAAAATGAAGTTTTAAATCAATCTAAAGT | | | |
| | | ATATATGAGTAAACTTGGTCTGACAGTTACCAATGCTTAATCAGTGAG | | | |
| | | GCACCTATCTCAGCGATCTGTCTATTTCGTTCATCCATAGTTGCCTGAC | | | |
| | | TCCCCGTCGTGTAGATAACTACGATACGGGAGGGCTTACCATCTGGC | | | |
| | | CCCAGTGCTGCAATGATACCGCGAGACCCACGCTCACCGGCTCCAGA | | | |
| | | TTTATCAGCAATAAACCAGCCAGCCGGAAGGGCCGAGCGCAGAAGT | | | |
| | | GGTCCTGCAACTTTATCCGCCTCCATCCAGTCTATTAATTGTTGCCGG | | | |
| | | GAAGCTAGAGTAAGTAGTTCGCCAGTTAATAGTTTGCGCAACGTTGT | | | |
| | | TGCCATTGCTACAGGCATCGTGGTGTCACGCTCGTCGTTTGGTATGGC | | | |
| | | TTCATTCAGCTCCGGTTCCCAACGATCAAGGCGAGTTACATGATCCCC | | | |
| | | CATGTTGTGCAAAAAAGCGGTTAGCTCCTTCGGTCCTCCGATCGTTGT | | | |
| | | CAGAAGTAAGTTGGCCGCAGTGTTATCACTCATGGTTATGGCAGCAC | | | |
| | | TGCATAATTCTCTTACTGTCATGCCATCCGTAAGATGCTTTTCTGTGAC | | | |
| | | TGGTGAGTACTCAACCAAGTCATTCTGAGAATAGTGTATGCGGCGAC | | | |
| | | CGAGTTGCTCTTGCCCGGCGTCAATACGGGATAATACCGCGCCACAT | | | |
| | | AGCAGAACTTTAAAAGTGCTCATCATTGGAAAACGTTCTTCGGGGCG | | | |
| | | AAAACTCTCAAGGATCTTACCGCTGTTGAGATCCAGTTCGATGTAACC | | | |
| | | CACTCGTGCACCCAACTGATCTTCAGCATCTTTTACTTTCACCAGCGTT | | | |
| | | TCTGGGTGAGCAAAAACAGGAAGGCAAAATGCCGCAAAAAAGGGAA | | | |
| | | TAAGGGCGACACGGAAATGTTGAATACTCATACTCTTCCTTTTTCAAT | | | |
| | | ATTATTGAAGCATTTATCAGGGTTATTGTCTCATGAGCGGATACATAT | | | |
| | | TTGAATGTATTTAGAAAAATAAACAAATAGGGGTTCCGCGCACATTTC | | | |
| | | CCCGAAAAGTGCCACCTGACGTCTAAGAAACCATTATTATCATGACAT | | | |
| | | TAACCTATAAAAATAGGCGTATCACGAGGCCCTTTCGTCTCGCGCGTT | | | |
| | | TCGGTGATGACGGTGAAAACCTCTGACACATGCAGCTCCCGGAGACG | | | |
| | | GTCACAGCTTGTCTGTAAGCGGATGCCGGGAGCAGACAAGCCCGTCA | | | |
| | | GGGCGCGTCAGCGGGTGTTGGCGGGTGTCGGGGCTGGCTTAACTAT | | | |
| | | GCGGCATCAGAGCAGATTGTACTGAGAGTGCACCATATGCGGTGTGA | | | |
| | | AATACCGCACAGATGCGTAAGGAGAAAATACCGCATCAGGCGCCATT | | | |
| | | CGCCATTCAGGCTGCGCAACTGTTGGGAAGGGCGATCGGTGCGGGC | | | |
| | | CTCTTCGCTATTACGCCAGCTGGCGAAAGGGGGATGTGCTGCAAGGC | | | |
| | | GATTAAGTTGGGTAACGCCAGGGTTTTCCCAGTCACGACGTTGTAAA | | | |
| | | ACGACGGCCAGT | | | |
| DRIVER_ | PLV10052 | GAATTCGAGCTTGCATGCCTGCAGGTCGTTACATAACTTACGGTAAAT | 320 | N/A | |
| pCMV_R- | | GGCCCGCCTGGCTGACCGCCCAACGACCCCCGCCCATTGACGTCAAT | | | |
| U5-PBS*- | | AATGACGTATGTTCCCATAGTAACGCCAATAGGGACTTTCCATTGACG | | | |
| MusD6- | | TCAATGGGTGGAGTATTTACGGTAAACTGCCCACTTGGCAGTACATC | | | |
| LTR_v1 | | AAGTGTATCATATGCCAAGTACGCCCCCTATTGACGTCAATGACGGTA | | | |
| | | AATGGCCCGCCTGGCATTATGCCCAGTACATGACCTTATGGGACTTTC | | | |
| | | CTACTTGGCAGTACATCTACGTATTAGTCATCGCTATTACCATGGTGA | | | |
| | | TGCGGTTTTGGCAGTACATCAATGGGCGTGGATAGCGGTTTGACTCA | | | |
| | | CGGGGATTTCCAAGTCTCCACCCCATTGACGTCAATGGGAGTTTGTTT | | | |
| | | TGGCACCAAAATCAACGGGACTTTCCAAAATGTCGTAACAACTCCGCC | | | |
| | | CCATTGACGCAAATGGGCGGTAGGCGTGTACGGTGGGAGGTCTATA | | | |
| | | TAAGCAGAGCTCGTTTAGTGAACCGTCAGAGCTTTGATCAGAATGAA | | | |
| | | TTTGTCTTGGCTCCGTTTCTTCTTTCGCCCCGTCTAGATTCCTCTCTTAC | | | |
| | | AGCTCGAGTGGCCTTCTCAGTCGAACCGTTCACGTTGCGAGCTGCTG | | | |
| | | GCGGCCGCAACATTTTAGCGACTAAACACATCACTGAAGAATCCGAG | | | |
| | | AGAGATGCTAAGAGGAACGCTGCTTTGGAGCTCCACAGGAAAGGAT | | | |
| | | CTTCGTATCGGACATCGGAGCAACGGACAGGTACACATGCTAGCGCT | | | |
| | | AGCTTAAAATTTCAGTTTTGTAAAGTGTTGCTGAGGATGTGGTAGGA | | | |
| | | TACGAATTAAGCTTGAATCAGTGCTAACCCAACGCTGGTTCTGCTTGG | | | |
| | | GTCAGCAGCGTGTTAATCGGAACTAGAAACGGAAACAGGCAGGTTA | | | |
| | | GCCGCAGCTTTTTAGGAAGCTGCTTAGGTGGAAGAAGAAAGGGTTTA | | | |
| | | AAGTCATGGATCAGGCGGTTGCCCATAGTTTTCAGGAGTTGTTTCAG | | | |
| | | GCCAGAGGAGTAAGGCTTGAAGTACAATTAGTAAAAAATTTTTTAGG | | | |
| | | TAAGATAGATAGCTGTTGCCCATGGTTCAAGGAAGAAGAAACACTAG | | | |
| | | ATTGTGGAACCTGGGAGAAAGTTGGTGAGGCCTTAAAAATCACTCAG | | | |
| | | GCAGATAATTTTACCCTAGGCCTCTGGGCACTCATAAATGATGCAATA | | | |
| | | AAAGATGCCACTTCCCCAGGGCTAAGTTGCCCCCAGGCGGAGCTTGT | | | |
| | | GGTATCTCAGGAGGAGTGCCTGTCAGAGAGGGCCTCCTCAGAAAAA | | | |
| | | GATCTTCTTAACTCAAAAATTGATAAATGTGGAAACTCGGATGAAAA | | | |
| | | ACTGATTTTTAACAAAAATCACTCAGATAGAGGAGCTGCCCATTACCT | | | |
| | | TAATGAGAATTGGTCCTCTTGTGAATCTCCTGCTCAACCTGTAGTCCC | | | |
| | | CACTTCGGGAGGTGCCACTCATAGGGACACACGACTAAGCGAGTTAG | | | |
| | | AGTTTGAGATTAAGCTTCAGAGGCTGACTAATGAGCTTCGGGAACTA | | | |
| | | AAAAAGATGTCAGAAGCGGAGAAGAGTAACTCTTCTGTAGTTCACCA | | | |
| | | GGTGCCGCTAGAAAAGGTTGTGAGTCAGGCTCATGGGAAAGGACAG | | | |
| | | AATATCTCTAATACGCTAGCCTTTCCTGTGGTTGAGGTAGTTGATCAG | | | |
| | | CAAGATACTAGGGGCAGACATTACCAGACCTTAGATTTCAAGTTGAT | | | |
| | | AAAAGAGTTAAAGGCGGCTGTTGTGCAATATGGCCCTTCAGCCCCAT | | | |
| | | TCACTCAAGCATTACTGGACACAGTTGTGGAGTCACACTTAACCCCTT | | | |
| | | TAGATTGGAAGACTCTTTCTAAGGCTACCCTGTCAGGAGGAGATTTTT | | | |
| | | TGCTTTGGGATTCTGAATGGCGAGACGCCAGTAAGAAAACTGCTGCT | | | |
| | | TCTAACGCTCAGGCTGGTAATTCAGACTGGGATAGCAACATGCTTTTA | | | |
| | | GGAGAGGGCCCTTATGAGGGACAGACAAATCAGATTGATTTTCCCGT | | | |
| | | TGCAGTGTACGCGCAAATTGCGACGGCCGCACGCCGTGCTTGGGGA | | | |
| | | AGGTTGCCAGTCAAAGGAGAGATTGGTGGAAGTTTAGCTAGCATTCG | | | |
| | | GCAGAGTTCTGATGAACCATATCAGGATTTTGTGGACAGGCTATTGA | | | |
| | | TTTCAGCTAGTAGAATCCTTGGAAATCCGGACACGGGAAGTCCTTTCG | | | |
| | | TTATGCAATTGGCTTATGAGAATGCTAACGCAATTTGCCGAGCTGCGA | | | |
| | | TTCAACCGCATAAGGGAACGACAGATTTGGCGGGATATGTCCGTCTT | | | |
| | | TGCGCAGACATCGGGCCTTCCTGCGAGACCTTGCAGGGAACCCACGC | | | |
| | | GCAGGCAATGTTCTCTAGGAAACGAGGGAATAGTGCATGCTTTAAAT | | | |
| | | GTGGAAGTTTAGATCATTTTAGAATTGATTGTCCTCAGAACAAGGGC | | | |
| | | GCCGAGGTTAGACAAACAGGCCGTGCCCCGGGAATATGTCCCCGATG | | | |
| | | TGGAAAGGGCCGCCACTGGGCGAAAGATTGCAAGCATAAAACGAGG | | | |
| | | GTTTTGAGCCGCCCGGTGCCGGGAAACGAGGAAAGGGGTCAGCCCC | | | |
| | | AGGCCCCAAGTTACTCAAAGAAGACAGCTTATGGGGCTCTAAATCTG | | | |
| | | CTGCCCAGCCAACAAGATCAGTTCTTGAGCTTGTCAGGTCAAACCCAG | | | |
| | | GAAACGCAAGACTGGACCTCTGTTCCACTGTCCATGCAGCATTAACCC | | | |
| | | CAGAAGTGGGAGTCCAAACTCTGCCTACCGGAGTCTTTGGACCACTA | | | |
| | | CCTGTAGGAACCTGTGGTTTTCTCTTAGGACGAAGCAGTTCTATTGTA | | | |
| | | GAAGGCCTGCAGATTTATCCAGGTGTTATAAGTAATGATTATGAGGG | | | |
| | | AGAAATTAAAATCATAGCCGCTTGCCCTCGTGGTGCTATAACTATACC | | | |
| | | CGCTAATCAGAAAATTGCTCAACTTACCTTGATCCCCTTGCGCTGGTC | | | |
| | | ACTATCTAAATTCTCTAAAAATGAAGAAGGACAGATTAACTTTGACTC | | | |
| | | CTCTGGCGTAAATTGGGTGAAATCTATCACTAATCAGAGACCTAACCT | | | |
| | | TAAATTGATTCTTGATGGAAAAAGCTTTGAAGGATTAATAGATACCG | | | |
| | | GGGCCGATGTAACCATTATTAGAGGGCAGGACTGGCCCTCAAACTGG | | | |
| | | CCCCTGTCTGTTTCCTTGACTCACCTTCAAGGAATTGGTTATGCCAGTA | | | |
| | | ACCCAAAACGTAGTTCCAAATTGCTAACCTGGAGAGATGAGGATGGA | | | |
| | | AAATCAGGAAATATTCAGCCGTATGTTATGCAAAATTTGCCTGTAACC | | | |
| | | CTGTGGGGAAGAGATCTGTTGTCACAGATGGGCGTTATCCTGTGCAG | | | |
| | | TTCTAAGGAAATGGTGACTGAACAGACGTTCAGGCAGGGACCCCTGC | | | |
| | | CTGATCGTGGACTAATAAAGAAGGGACAGAAAATTAAGACTTTTGAA | | | |
| | | GATCTTAAACCCCACTCTAACGTGAGAGGTTTAAAGTATTTTCAGTAG | | | |
| | | TGGCCGCTGTCTTGCCTGCATCCCACGCCGAAAAAATTCAATGGCGTA | | | |
| | | ATGATATTCCGGTGTGGGTAGATCAGTGGTCTTTACCTAAAGAGAAA | | | |
| | | ATAGAGGCCGCTTCTCTGCTAGTGCAGGAGCAGTTAGAAGCAGGACA | | | |
| | | TTTGGTGGAGTCTCATTCTCCCTGGAATACACCCATTTTCATTATCAGG | | | |
| | | AAGAAATCGGGAAAATGGAGACTGTTGCAAGATTTAAGAAAGGTTA | | | |
| | | ATGAAACCATGGTACTTATGGGAACTTTACAACCGGGGCTCCCCTCCC | | | |
| | | CAGTAGCCATTCCTAAGGGATACTATAAGATTGTTATAGATTTGAAAG | | | |
| | | ATTGTTTCTTTACCATCCCTTTGCATCCAGAGGATTGTGAGAGATTTGC | | | |
| | | TTTTAGTGTTCCTTCTGTAAATTTCAAGGAACCCATGAAAAGATATCA | | | |
| | | ATGGACAGTTCTCCCGCAGGGGATGGCTAATAGTCCCACCTTATGTCA | | | |
| | | AAAGTTTGTGGCAAAGGCAATTCAGCCTGTTAGACAACAATGGCCAA | | | |
| | | ATATTTACATCATTCATTTCACAGATGATGTTTTGATGGCGGGAAAGG | | | |
| | | ACCCCCAAGATTTGCTTTTGTGTTATGGAGACTTACGAAAGGCCCTGG | | | |
| | | CTGATAAGGGATTACAAATTGCTTCTGAAAAGATACAAACTCAGGAT | | | |
| | | CCTTATAATTATTTGGGTTTTAGACTCACTGACCAAGCTGTTTTTCACC | | | |
| | | AGAAAATTGTTATTCGTAGAGATAACTTAAGGACCTTAAATGATTTTC | | | |
| | | AAAAATTGTTAGGTGATATAAACTGGCTTCGCCCCTATCTAAAGCTTA | | | |
| | | CTACAGGGGAGTTGAAACCTTTATTTGATATTCTTAAAGGGAGTTCTG | | | |
| | | ATCCTACTTCCCCTAGATCCCTAACCTCAGAAGGTTTACTGGCCTTACA | | | |
| | | GCTAGTGGAAAAGGCTATTGAAGAACAGTTTGTCACTTACATAGATT | | | |
| | | ACTCCCTGCCGCTGCACCTGTTAATTTTTAACACGACTCATGTGCCTAC | | | |
| | | GGGATTGCTATGGCAAAAATTTCCTATAATGTGGATACATTCAAGGAT | | | |
| | | TTCTCCCAAACGTAATATTTTGCCATATCATGAAGCAGTGGCTCAGAT | | | |
| | | GATTATCACTGGAAGAAGGCAGGCATTGACTTATTTTGGAAAGGAGC | | | |
| | | CAGATATCATTGTCCAGCCTTACAGCGTGAGTCAGGACACTTGGCTG | | | |
| | | AAACAGCATAGTACAGATTGGTTGCTTGCACAATTAGGGTTTGAAGG | | | |
| | | AACTATAGATAGCCACTACCCCCAAGATAGGTTGATAAAATTCTTAAA | | | |
| | | TGTACATGATATGATATTTCCTAAGATGACTTCCTTACAGCCTTTAAAT | | | |
| | | AATGCTCTATTGATTTTTACTGATGGCTCCTCTAAAGGGCGAGCTGGA | | | |
| | | TATCTTATTAGTAATCAACAGGTTATCGTAGAGACTCCTGGTCTCTCG | | | |
| | | GCTCAGCTCGCCGAACTAACAGCAGTACTGAAGGTTTTTCAGTCTGTA | | | |
| | | CAGGAGGCTTTTAATATTTTTACTGACAGTTTATATGTTGCTCAGTCA | | | |
| | | GTACCCTTATTGGAAACCTGTGGTACTTTTAACTTCAATACGCCGTCA | | | |
| | | GGATCTTTATTTTCAGAATTACAAAACATCATTCTCGCCCGGAAAAAT | | | |
| | | CCGTTTTATATTGGCCACATACGGTCTCACTCTGGTCTTCCTGGACCTC | | | |
| | | TGGCAGAGGGTAATAATTGCATTGACAGAGCTCTAATAGGAGAAGCC | | | |
| | | TTAGTTTCAGATCGGGTTGCTTTGGCCCAACGTGATCATGAAAGGTTT | | | |
| | | CATCTCTCTAGCCATACCCTAAGGCTCCGACATAAGATCACCAAGGAG | | | |
| | | CAAGCGAGAATGATTGTAAAACAATGTCCTAAATGTATTACTTTATCT | | | |
| | | CCAGTGCCGCATCTAGGAGTTAATCCTAGAGGCCTTATGCCTAATCAT | | | |
| | | ATTTGGCAAATGGATATAACCCATTATGCAGAATTTGGAAAACTAAA | | | |
| | | ATATATACATGTTTGCATTGATACTTGTTCAGGATTTCTCTTTGCTTCTC | | | |
| | | TGCATACAGGAGAAGCTTCAAAAAACGTAATTGATCATTGCCTACAA | | | |
| | | GCATTTAATGCCATGGGATTACCTAAACTTATTAAGACAGACAATGG | | | |
| | | GCCATCTTATTCCAGTAAAAACTTTATTTCATTCTGTAAAGAATTCGGT | | | |
| | | ATTAAACATAAAACTGGAATTCCTTACAACCCCATGGGACAAGGAAT | | | |
| | | AGTTGAACGTGCTCATCGCACCTTAAAGAATTGGCTCTTTAAGACAAA | | | |
| | | AGAGGGGCAGCTATATCCCCCAAGGTCTCCAAAGGCCCACCTTGCCT | | | |
| | | TCACCTTATTTGTCCTAAATTTCTTGCACACCGATATCAAGGGCCAGTC | | | |
| | | TGCAGCGGATCGCCACTGGCATCCAGTTACTTCTAATTCTTATGCATT | | | |
| | | GGTAAAATGGAAGGACCCCCTGACTAATGAATGGAAGGGTCCAGAT | | | |
| | | CCAGTTCTAATTTGGGGTAGAGGCTCAGTTTGTGTTTTTTCACGAGAT | | | |
| | | GAAGATGGAGCACGGTGGCTGCCAGAGAGATTAATTCGTCAGACGA | | | |
| | | ACACAGATTCTGACTCTTCTGGTAAGTATCATTCTAAAGACTAAAATT | | | |
| | | CCTTTTGTGCTTAAAATTCAGCTGAGAGCAACAGCTCTCAAAGCTGTT | | | |
| | | CTCCAGCTACTCTCTGAGCCAGCTCCCGACAGGAGGCCGGAGACTAG | | | |
| | | CCTCAGCTTTACAATTTGCATTTAAATAAAGTACCTAGACTTCCCCGAA | | | |
| | | AAAAGTTCTGCTTTTCTACTTTCTCACTGTCTTTCAAGATTTTGTCTTTC | | | |
| | | AAGCAGGTAAATCAACATTCTCGAGGCGGACCAGCGGATGTGCATCC | | | |
| | | CCGCCCCCCTAGAGCACTCAGGTGGCAGCTGTTATCCCCAGTCTCAGG | | | |
| | | ACATTCCAGCATGTGGCCTTCAGTCTGAGTTAAAAATTAGGTTTACCC | | | |
| | | AGAGGACTAGAATAGTAGATATTTCTATATTAATAAAGATTGGTTTTT | | | |
| | | ATTTTGATAGACAGGCTTAGCCCCTTAGCTGACCTCTGGCTTTTCACCC | | | |
| | | TTGCTGTTACTGCAAGGTGTCTTTAGCTCAATAAGGCTGTGGAAAAAA | | | |
| | | ACAGGGATGAGGAGGAACGGCTCCCAGCTCCTATTTTAGCCACAAAT | | | |
| | | CGTGGTGTTACTAACGACATAATTCTTGCTTAGGCTTTGCTAAATCTG | | | |
| | | AGGTTGATAATTCTCCTTTAGGAGCTGCACAGCGCTCAGAACTGTGCA | | | |
| | | TACTGATTTGTGATGGTACAAATTCAGTATGGGCATCGCTTGGTGCA | | | |
| | | GATGGAGGTACTGCAAGGAAAGGTCCCAGCTTGACCATTTCTGAGTT | | | |
| | | TCCTGTGAGATAAACCCGGTTTGAAAGAGGTTGGTACCAAATTATAT | | | |
| | | ATCCCTCGGCTCTACCTCGCCTCCCCAAAAGGTACCAGAGCCACAGGT | | | |
| | | GTGGATTTTAACAGAATCCACGGGAGGAATCGGGTCCATGTCCACCC | | | |
| | | AAGCCAAGGTTAAAAGCCCACTCATCTACGGATGAGAAAATCATTTG | | | |
| | | ATCACCTCAGTTAAGCGCTGCCTTATTTTAACTTAATTAATAGGGGGG | | | |
| | | AGAGAGATTGGAGACTTACTATTGAAAGGGCAAGCCCTTCACTGCCT | | | |
| | | CCCACCCAAATAAAAAAGCCAATTGGCCTTGTACTACAGAGCTGGCC | | | |
| | | GGACCCCTTATCCCTGTTACCCACCAATCATCCAAAAATGCGGAGGAA | | | |
| | | TATCAACTTAGTGTTATTCTTATTATAGTGTATTTCACACTTGTTCAGTC | | | |
| | | AAACTTAGCCAGAGTTCCAACGCCCTACTTAAAATTCAACTAGAAAGT | | | |
| | | TACCTACCAAGTACTAATTAGCATTATAAAGTCAGAGCCTACAGCTCC | | | |
| | | AGGCTTTTCAGTTAGTTGTTTACTAAGATAAGAAAAGACAGTCTTAGC | | | |
| | | CAGATACAGTTTACCATAATAAAAGTTAAAGAATCCCAGGGAAGCAA | | | |
| | | GTTTTTTCTTTTAGCCCTAGATTCCAGGCAGAACTATTGAGCATAGAT | | | |
| | | AATTTTTCCCCCTCAGGCCAGCTTTTTCTTTTTTTTTAATTTTGTTAATA | | | |
| | | AAAGGGAGGAGATGTAGTCTCCCCTCCCCCAGCCTGAAACCTGCTTG | | | |
| | | CTCAGGGGTGGAGCTTCCCGCTCATCGCTCTGCCACGCCCACTGCTG | | | |
| | | GAACCTGCGGAGCCACACACGTGCACCTTTCTACTGGACCAGAGATT | | | |
| | | ATTCGGCGGGAATCGGGTCCCCTCCCCCTTCCTTCATAACTAGTGTCC | | | |
| | | CAACAATAAAATTTGAGCTTTGATCAGAATGAATTTGTCTTGGCTCCG | | | |
| | | TTTCTTCTTTCGCCCCGTCTAGATTCCTCTCTTACAGCTCGAGTGGCCT | | | |
| | | TCTCAGTCGAACCGTTCACGTTGCGAGCTGCTGGCGGCCGCAACAGG | | | |
| | | GGATCCAGACATGATAAGATACATTGATGAGTTTGGACAAACCACAA | | | |
| | | CTAGAATGCAGTGAAAAAAATGCTTTATTTGTGAAATTTGTGATGCTA | | | |
| | | TTGCTTTATTTGTAACCATTATAAGCTGCAATAAACAAGTTAACAACA | | | |
| | | ACAATTGCATTCATTTTATGTTTCAGGTTCAGGGGGAGGTGTGGGAG | | | |
| | | GTTTTTTCGGATCCTCTAGAGTCGACCTGCAGGCATGCAAGCTTGGCG | | | |
| | | TAATCATGGTCATAGCTGTTTCCTGTGTGAAATTGTTATCCGCTCACAA | | | |
| | | TTCCACACAACATACGAGCCGGAAGCATAAAGTGTAAAGCCTGGGGT | | | |
| | | GCCTAATGAGTGAGCTAACTCACATTAATTGCGTTGCGCTCACTGCCC | | | |
| | | GCTTTCCAGTCGGGAAACCTGTCGTGCCAGCTGCATTAATGAATCGG | | | |
| | | CCAACGCGCGGGGAGAGGCGGTTTGCGTATTGGGCGCTCTTCCGCTT | | | |
| | | CCTCGCTCACTGACTCGCTGCGCTCGGTCGTTCGGCTGCGGCGAGCG | | | |
| | | GTATCAGCTCACTCAAAGGCGGTAATACGGTTATCCACAGAATCAGG | | | |
| | | GGATAACGCAGGAAAGAACATGTGAGCAAAAGGCCAGCAAAAGGCC | | | |
| | | AGGAACCGTAAAAAGGCCGCGTTGCTGGCGTTTTTCCATAGGCTCCG | | | |
| | | CCCCCCTGACGAGCATCACAAAAATCGACGCTCAAGTCAGAGGTGGC | | | |
| | | GAAACCCGACAGGACTATAAAGATACCAGGCGTTTCCCCCTGGAAGC | | | |
| | | TCCCTCGTGCGCTCTCCTGTTCCGACCCTGCCGCTTACCGGATACCTGT | | | |
| | | CCGCCTTTCTCCCTTCGGGAAGCGTGGCGCTTTCTCATAGCTCACGCT | | | |
| | | GTAGGTATCTCAGTTCGGTGTAGGTCGTTCGCTCCAAGCTGGGCTGT | | | |
| | | GTGCACGAACCCCCCGTTCAGCCCGACCGCTGCGCCTTATCCGGTAAC | | | |
| | | TATCGTCTTGAGTCCAACCCGGTAAGACACGACTTATCGCCACTGGCA | | | |
| | | GCAGCCACTGGTAACAGGATTAGCAGAGCGAGGTATGTAGGCGGTG | | | |
| | | CTACAGAGTTCTTGAAGTGGTGGCCTAACTACGGCTACACTAGAAGG | | | |
| | | ACAGTATTTGGTATCTGCGCTCTGCTGAAGCCAGTTACCTTCGGAAAA | | | |
| | | AGAGTTGGTAGCTCTTGATCCGGCAAACAAACCACCGCTGGTAGCGG | | | |
| | | TGGTTTTTTTGTTTGCAAGCAGCAGATTACGCGCAGAAAAAAAGGAT | | | |
| | | CTCAAGAAGATCCTTTGATCTTTTCTACGGGGTCTGACGCTCAGTGGA | | | |
| | | ACGAAAACTCACGTTAAGGGATTTTGGTCATGAGATTATCAAAAAGG | | | |
| | | ATCTTCACCTAGATCCTTTTAAATTAAAAATGAAGTTTTAAATCAATCT | | | |
| | | AAAGTATATATGAGTAAACTTGGTCTGACAGTTACCAATGCTTAATCA | | | |
| | | GTGAGGCACCTATCTCAGCGATCTGTCTATTTCGTTCATCCATAGTTG | | | |
| | | CCTGACTCCCCGTCGTGTAGATAACTACGATACGGGAGGGCTTACCA | | | |
| | | TCTGGCCCCAGTGCTGCAATGATACCGCGAGACCCACGCTCACCGGC | | | |
| | | TCCAGATTTATCAGCAATAAACCAGCCAGCCGGAAGGGCCGAGCGCA | | | |
| | | GAAGTGGTCCTGCAACTTTATCCGCCTCCATCCAGTCTATTAATTGTTG | | | |
| | | CCGGGAAGCTAGAGTAAGTAGTTCGCCAGTTAATAGTTTGCGCAACG | | | |
| | | TTGTTGCCATTGCTACAGGCATCGTGGTGTCACGCTCGTCGTTTGGTA | | | |
| | | TGGCTTCATTCAGCTCCGGTTCCCAACGATCAAGGCGAGTTACATGAT | | | |
| | | CCCCCATGTTGTGCAAAAAAGCGGTTAGCTCCTTCGGTCCTCCGATCG | | | |
| | | TTGTCAGAAGTAAGTTGGCCGCAGTGTTATCACTCATGGTTATGGCA | | | |
| | | GCACTGCATAATTCTCTTACTGTCATGCCATCCGTAAGATGCTTTTCTG | | | |
| | | TGACTGGTGAGTACTCAACCAAGTCATTCTGAGAATAGTGTATGCGG | | | |
| | | CGACCGAGTTGCTCTTGCCCGGCGTCAATACGGGATAATACCGCGCC | | | |
| | | ACATAGCAGAACTTTAAAAGTGCTCATCATTGGAAAACGTTCTTCGGG | | | |
| | | GCGAAAACTCTCAAGGATCTTACCGCTGTTGAGATCCAGTTCGATGTA | | | |
| | | ACCCACTCGTGCACCCAACTGATCTTCAGCATCTTTTACTTTCACCAGC | | | |
| | | GTTTCTGGGTGAGCAAAAACAGGAAGGCAAAATGCCGCAAAAAAGG | | | |
| | | GAATAAGGGCGACACGGAAATGTTGAATACTCATACTCTTCCTTTTTC | | | |
| | | AATATTATTGAAGCATTTATCAGGGTTATTGTCTCATGAGCGGATACA | | | |
| | | TATTTGAATGTATTTAGAAAAATAAACAAATAGGGGTTCCGCGCACAT | | | |
| | | TTCCCCGAAAAGTGCCACCTGACGTCTAAGAAACCATTATTATCATGA | | | |
| | | CATTAACCTATAAAAATAGGCGTATCACGAGGCCCTTTCGTCTCGCGC | | | |
| | | GTTTCGGTGATGACGGTGAAAACCTCTGACACATGCAGCTCCCGGAG | | | |
| | | ACGGTCACAGCTTGTCTGTAAGCGGATGCCGGGAGCAGACAAGCCC | | | |
| | | GTCAGGGCGCGTCAGCGGGTGTTGGCGGGTGTCGGGGCTGGCTTAA | | | |
| | | CTATGCGGCATCAGAGCAGATTGTACTGAGAGTGCACCATATGCGGT | | | |
| | | GTGAAATACCGCACAGATGCGTAAGGAGAAAATACCGCATCAGGCG | | | |
| | | CCATTCGCCATTCAGGCTGCGCAACTGTTGGGAAGGGCGATCGGTGC | | | |
| | | GGGCCTCTTCGCTATTACGCCAGCTGGCGAAAGGGGGATGTGCTGCA | | | |
| | | AGGCGATTAAGTTGGGTAACGCCAGGGTTTTCCCAGTCACGACGTTG | | | |
| | | TAAAACGACGGCCAGT | | | |
| DRIVER_ | PLV10053 | GAATTCGAGCTTGCATGCCTGCAGGTCGTTACATAACTTACGGTAAAT | 321 | N/A | |
| pCMV_R- | | GGCCCGCCTGGCTGACCGCCCAACGACCCCCGCCCATTGACGTCAAT | | | |
| U5-PBS*- | | AATGACGTATGTTCCCATAGTAACGCCAATAGGGACTTTCCATTGACG | | | |
| MusD6- | | TCAATGGGTGGAGTATTTACGGTAAACTGCCCACTTGGCAGTACATC | | | |
| LTR_v2 | | AAGTGTATCATATGCCAAGTACGCCCCCTATTGACGTCAATGACGGTA | | | |
| | | AATGGCCCGCCTGGCATTATGCCCAGTACATGACCTTATGGGACTTTC | | | |
| | | CTACTTGGCAGTACATCTACGTATTAGTCATCGCTATTACCATGGTGA | | | |
| | | TGCGGTTTTGGCAGTACATCAATGGGCGTGGATAGCGGTTTGACTCA | | | |
| | | CGGGGATTTCCAAGTCTCCACCCCATTGACGTCAATGGGAGTTTGTTT | | | |
| | | TGGCACCAAAATCAACGGGACTTTCCAAAATGTCGTAACAACTCCGCC | | | |
| | | CCATTGACGCAAATGGGCGGTAGGCGTGTACGGTGGGAGGTCTATA | | | |
| | | TAAGCAGAGCTCGTTTAGTGAACCGTCAGCTTTGATCAGAATGAATTT | | | |
| | | GTCTTGGCTCCGTTTCTTCTTTCGCCCCGTCTAGATTCCTCTCTTACAGC | | | |
| | | TCGAGTGGCCTTCTCAGTCGAACCGTTCACGTTGCGAGCTGCTGGCG | | | |
| | | GCCGCAACATTTTAGCGACTAAACACATCACTGAAGAATCCGAGAGA | | | |
| | | GATGCTAAGAGGAACGCTGCTTTGGAGCTCCACAGGAAAGGATCTTC | | | |
| | | GTATCGGACATCGGAGCAACGGACAGGTACACATGCTAGCGCTAGCT | | | |
| | | TAAAATTTCAGTTTTGTAAAGTGTTGCTGAGGATGTGGTAGGATACG | | | |
| | | AATTAAGCTTGAATCAGTGCTAACCCAACGCTGGTTCTGCTTGGGTCA | | | |
| | | GCAGCGTGTTAATCGGAACTAGAAACGGAAACAGGCAGGTTAGCCG | | | |
| | | CAGCTTTTTAGGAAGCTGCTTAGGTGGAAGAAGAAAGGGTTTAAAGT | | | |
| | | CATGGATCAGGCGGTTGCCCATAGTTTTCAGGAGTTGTTTCAGGCCA | | | |
| | | GAGGAGTAAGGCTTGAAGTACAATTAGTAAAAAATTTTTTAGGTAAG | | | |
| | | ATAGATAGCTGTTGCCCATGGTTCAAGGAAGAAGAAACACTAGATTG | | | |
| | | TGGAACCTGGGAGAAAGTTGGTGAGGCCTTAAAAATCACTCAGGCA | | | |
| | | GATAATTTTACCCTAGGCCTCTGGGCACTCATAAATGATGCAATAAAA | | | |
| | | GATGCCACTTCCCCAGGGCTAAGTTGCCCCCAGGCGGAGCTTGTGGT | | | |
| | | ATCTCAGGAGGAGTGCCTGTCAGAGAGGGCCTCCTCAGAAAAAGATC | | | |
| | | TTCTTAACTCAAAAATTGATAAATGTGGAAACTCGGATGAAAAACTG | | | |
| | | ATTTTTAACAAAAATCACTCAGATAGAGGAGCTGCCCATTACCTTAAT | | | |
| | | GAGAATTGGTCCTCTTGTGAATCTCCTGCTCAACCTGTAGTCCCCACTT | | | |
| | | CGGGAGGTGCCACTCATAGGGACACACGACTAAGCGAGTTAGAGTTT | | | |
| | | GAGATTAAGCTTCAGAGGCTGACTAATGAGCTTCGGGAACTAAAAAA | | | |
| | | GATGTCAGAAGCGGAGAAGAGTAACTCTTCTGTAGTTCACCAGGTGC | | | |
| | | CGCTAGAAAAGGTTGTGAGTCAGGCTCATGGGAAAGGACAGAATAT | | | |
| | | CTCTAATACGCTAGCCTTTCCTGTGGTTGAGGTAGTTGATCAGCAAGA | | | |
| | | TACTAGGGGCAGACATTACCAGACCTTAGATTTCAAGTTGATAAAAG | | | |
| | | AGTTAAAGGCGGCTGTTGTGCAATATGGCCCTTCAGCCCCATTCACTC | | | |
| | | AAGCATTACTGGACACAGTTGTGGAGTCACACTTAACCCCTTTAGATT | | | |
| | | GGAAGACTCTTTCTAAGGCTACCCTGTCAGGAGGAGATTTTTTGCTTT | | | |
| | | GGGATTCTGAATGGCGAGACGCCAGTAAGAAAACTGCTGCTTCTAAC | | | |
| | | GCTCAGGCTGGTAATTCAGACTGGGATAGCAACATGCTTTTAGGAGA | | | |
| | | GGGCCCTTATGAGGGACAGACAAATCAGATTGATTTTCCCGTTGCAG | | | |
| | | TGTACGCGCAAATTGCGACGGCCGCACGCCGTGCTTGGGGAAGGTT | | | |
| | | GCCAGTCAAAGGAGAGATTGGTGGAAGTTTAGCTAGCATTCGGCAG | | | |
| | | AGTTCTGATGAACCATATCAGGATTTTGTGGACAGGCTATTGATTTCA | | | |
| | | GCTAGTAGAATCCTTGGAAATCCGGACACGGGAAGTCCTTTCGTTAT | | | |
| | | GCAATTGGCTTATGAGAATGCTAACGCAATTTGCCGAGCTGCGATTC | | | |
| | | AACCGCATAAGGGAACGACAGATTTGGCGGGATATGTCCGTCTTTGC | | | |
| | | GCAGACATCGGGCCTTCCTGCGAGACCTTGCAGGGAACCCACGCGCA | | | |
| | | GGCAATGTTCTCTAGGAAACGAGGGAATAGTGCATGCTTTAAATGTG | | | |
| | | GAAGTTTAGATCATTTTAGAATTGATTGTCCTCAGAACAAGGGCGCC | | | |
| | | GAGGTTAGACAAACAGGCCGTGCCCCGGGAATATGTCCCCGATGTG | | | |
| | | GAAAGGGCCGCCACTGGGCGAAAGATTGCAAGCATAAAACGAGGGT | | | |
| | | TTTGAGCCGCCCGGTGCCGGGAAACGAGGAAAGGGGTCAGCCCCAG | | | |
| | | GCCCCAAGTTACTCAAAGAAGACAGCTTATGGGGCTCTAAATCTGCT | | | |
| | | GCCCAGCCAACAAGATCAGTTCTTGAGCTTGTCAGGTCAAACCCAGG | | | |
| | | AAACGCAAGACTGGACCTCTGTTCCACTGTCCATGCAGCATTAACCCC | | | |
| | | AGAAGTGGGAGTCCAAACTCTGCCTACCGGAGTCTTTGGACCACTAC | | | |
| | | CTGTAGGAACCTGTGGTTTTCTCTTAGGACGAAGCAGTTCTATTGTAG | | | |
| | | AAGGCCTGCAGATTTATCCAGGTGTTATAAGTAATGATTATGAGGGA | | | |
| | | GAAATTAAAATCATAGCCGCTTGCCCTCGTGGTGCTATAACTATACCC | | | |
| | | GCTAATCAGAAAATTGCTCAACTTACCTTGATCCCCTTGCGCTGGTCA | | | |
| | | CTATCTAAATTCTCTAAAAATGAAGAAGGACAGATTAACTTTGACTCC | | | |
| | | TCTGGCGTAAATTGGGTGAAATCTATCACTAATCAGAGACCTAACCTT | | | |
| | | AAATTGATTCTTGATGGAAAAAGCTTTGAAGGATTAATAGATACCGG | | | |
| | | GGCCGATGTAACCATTATTAGAGGGCAGGACTGGCCCTCAAACTGGC | | | |
| | | CCCTGTCTGTTTCCTTGACTCACCTTCAAGGAATTGGTTATGCCAGTAA | | | |
| | | CCCAAAACGTAGTTCCAAATTGCTAACCTGGAGAGATGAGGATGGAA | | | |
| | | AATCAGGAAATATTCAGCCGTATGTTATGCAAAATTTGCCTGTAACCC | | | |
| | | TGTGGGGAAGAGATCTGTTGTCACAGATGGGCGTTATCCTGTGCAGT | | | |
| | | TCTAAGGAAATGGTGACTGAACAGACGTTCAGGCAGGGACCCCTGCC | | | |
| | | TGATCGTGGACTAATAAAGAAGGGACAGAAAATTAAGACTTTTGAAG | | | |
| | | ATCTTAAACCCCACTCTAACGTGAGAGGTTTAAAGTATTTTCAGTAGT | | | |
| | | GGCCGCTGTCTTGCCTGCATCCCACGCCGAAAAAATTCAATGGCGTA | | | |
| | | ATGATATTCCGGTGTGGGTAGATCAGTGGTCTTTACCTAAAGAGAAA | | | |
| | | ATAGAGGCCGCTTCTCTGCTAGTGCAGGAGCAGTTAGAAGCAGGACA | | | |
| | | TTTGGTGGAGTCTCATTCTCCCTGGAATACACCCATTTTCATTATCAGG | | | |
| | | AAGAAATCGGGAAAATGGAGACTGTTGCAAGATTTAAGAAAGGTTA | | | |
| | | ATGAAACCATGGTACTTATGGGAACTTTACAACCGGGGCTCCCCTCCC | | | |
| | | CAGTAGCCATTCCTAAGGGATACTATAAGATTGTTATAGATTTGAAAG | | | |
| | | ATTGTTTCTTTACCATCCCTTTGCATCCAGAGGATTGTGAGAGATTTGC | | | |
| | | TTTTAGTGTTCCTTCTGTAAATTTCAAGGAACCCATGAAAAGATATCA | | | |
| | | ATGGACAGTTCTCCCGCAGGGGATGGCTAATAGTCCCACCTTATGTCA | | | |
| | | AAAGTTTGTGGCAAAGGCAATTCAGCCTGTTAGACAACAATGGCCAA | | | |
| | | ATATTTACATCATTCATTTCACAGATGATGTTTTGATGGGGGAAAGG | | | |
| | | ACCCCCAAGATTTGCTTTTGTGTTATGGAGACTTACGAAAGGCCCTGG | | | |
| | | CTGATAAGGGATTACAAATTGCTTCTGAAAAGATACAAACTCAGGAT | | | |
| | | CCTTATAATTATTTGGGTTTTAGACTCACTGACCAAGCTGTTTTTCACC | | | |
| | | AGAAAATTGTTATTCGTAGAGATAACTTAAGGACCTTAAATGATTTTC | | | |
| | | AAAAATTGTTAGGTGATATAAACTGGCTTCGCCCCTATCTAAAGCTTA | | | |
| | | CTACAGGGGAGTTGAAACCTTTATTTGATATTCTTAAAGGGAGTTCTG | | | |
| | | ATCCTACTTCCCCTAGATCCCTAACCTCAGAAGGTTTACTGGCCTTACA | | | |
| | | GCTAGTGGAAAAGGCTATTGAAGAACAGTTTGTCACTTACATAGATT | | | |
| | | ACTCCCTGCCGCTGCACCTGTTAATTTTTAACACGACTCATGTGCCTAC | | | |
| | | GGGATTGCTATGGCAAAAATTTCCTATAATGTGGATACATTCAAGGAT | | | |
| | | TTCTCCCAAACGTAATATTTTGCCATATCATGAAGCAGTGGCTCAGAT | | | |
| | | GATTATCACTGGAAGAAGGCAGGCATTGACTTATTTTGGAAAGGAGC | | | |
| | | CAGATATCATTGTCCAGCCTTACAGCGTGAGTCAGGACACTTGGCTG | | | |
| | | AAACAGCATAGTACAGATTGGTTGCTTGCACAATTAGGGTTTGAAGG | | | |
| | | AACTATAGATAGCCACTACCCCCAAGATAGGTTGATAAAATTCTTAAA | | | |
| | | TGTACATGATATGATATTTCCTAAGATGACTTCCTTACAGCCTTTAAAT | | | |
| | | AATGCTCTATTGATTTTTACTGATGGCTCCTCTAAAGGGCGAGCTGGA | | | |
| | | TATCTTATTAGTAATCAACAGGTTATCGTAGAGACTCCTGGTCTCTCG | | | |
| | | GCTCAGCTCGCCGAACTAACAGCAGTACTGAAGGTTTTTCAGTCTGTA | | | |
| | | CAGGAGGCTTTTAATATTTTTACTGACAGTTTATATGTTGCTCAGTCA | | | |
| | | GTACCCTTATTGGAAACCTGTGGTACTTTTAACTTCAATACGCCGTCA | | | |
| | | GGATCTTTATTTTCAGAATTACAAAACATCATTCTCGCCCGGAAAAAT | | | |
| | | CCGTTTTATATTGGCCACATACGGTCTCACTCTGGTCTTCCTGGACCTC | | | |
| | | TGGCAGAGGGTAATAATTGCATTGACAGAGCTCTAATAGGAGAAGCC | | | |
| | | TTAGTTTCAGATCGGGTTGCTTTGGCCCAACGTGATCATGAAAGGTTT | | | |
| | | CATCTCTCTAGCCATACCCTAAGGCTCCGACATAAGATCACCAAGGAG | | | |
| | | CAAGCGAGAATGATTGTAAAACAATGTCCTAAATGTATTACTTTATCT | | | |
| | | CCAGTGCCGCATCTAGGAGTTAATCCTAGAGGCCTTATGCCTAATCAT | | | |
| | | ATTTGGCAAATGGATATAACCCATTATGCAGAATTTGGAAAACTAAA | | | |
| | | ATATATACATGTTTGCATTGATACTTGTTCAGGATTTCTCTTTGCTTCTC | | | |
| | | TGCATACAGGAGAAGCTTCAAAAAACGTAATTGATCATTGCCTACAA | | | |
| | | GCATTTAATGCCATGGGATTACCTAAACTTATTAAGACAGACAATGG | | | |
| | | GCCATCTTATTCCAGTAAAAACTTTATTTCATTCTGTAAAGAATTCGGT | | | |
| | | ATTAAACATAAAACTGGAATTCCTTACAACCCCATGGGACAAGGAAT | | | |
| | | AGTTGAACGTGCTCATCGCACCTTAAAGAATTGGCTCTTTAAGACAAA | | | |
| | | AGAGGGGCAGCTATATCCCCCAAGGTCTCCAAAGGCCCACCTTGCCT | | | |
| | | TCACCTTATTTGTCCTAAATTTCTTGCACACCGATATCAAGGGCCAGTC | | | |
| | | TGCAGCGGATCGCCACTGGCATCCAGTTACTTCTAATTCTTATGCATT | | | |
| | | GGTAAAATGGAAGGACCCCCTGACTAATGAATGGAAGGGTCCAGAT | | | |
| | | CCAGTTCTAATTTGGGGTAGAGGCTCAGTTTGTGTTTTTTCACGAGAT | | | |
| | | GAAGATGGAGCACGGTGGCTGCCAGAGAGATTAATTCGTCAGACGA | | | |
| | | ACACAGATTCTGACTCTTCTGGTAAGTATCATTCTAAAGACTAAAATT | | | |
| | | CCTTTTGTGCTTAAAATTCAGCTGAGAGCAACAGCTCTCAAAGCTGTT | | | |
| | | CTCCAGCTACTCTCTGAGCCAGCTCCCGACAGGAGGCCGGAGACTAG | | | |
| | | CCTCAGCTTTACAATTTGCATTTAAATAAAGTACCTAGACTTCCCCGAA | | | |
| | | AAAAGTTCTGCTTTTCTACTTTCTCACTGTCTTTCAAGATTTTGTCTTTC | | | |
| | | AAGCAGGTAAATCAACATTCTCGAGGCGGACCAGCGGATGTGCATCC | | | |
| | | CCGCCCCCCTAGAGCACTCAGGTGGCAGCTGTTATCCCCAGTCTCAGG | | | |
| | | ACATTCCAGCATGTGGCCTTCAGTCTGAGTTAAAAATTAGGTTTACCC | | | |
| | | AGAGGACTAGAATAGTAGATATTTCTATATTAATAAAGATTGGTTTTT | | | |
| | | ATTTTGATAGACAGGCTTAGCCCCTTAGCTGACCTCTGGCTTTTCACCC | | | |
| | | TTGCTGTTACTGCAAGGTGTCTTTAGCTCAATAAGGCTGTGGAAAAAA | | | |
| | | ACAGGGATGAGGAGGAACGGCTCCCAGCTCCTATTTTAGCCACAAAT | | | |
| | | CGTGGTGTTACTAACGACATAATTCTTGCTTAGGCTTTGCTAAATCTG | | | |
| | | AGGTTGATAATTCTCCTTTAGGAGCTGCACAGCGCTCAGAACTGTGCA | | | |
| | | TACTGATTTGTGATGGTACAAATTCAGTATGGGCATCGCTTGGTGCA | | | |
| | | GATGGAGGTACTGCAAGGAAAGGTCCCAGCTTGACCATTTCTGAGTT | | | |
| | | TCCTGTGAGATAAACCCGGTTTGAAAGAGGTTGGTACCAAATTATAT | | | |
| | | ATCCCTCGGCTCTACCTCGCCTCCCCAAAAGGTACCAGAGCCACAGGT | | | |
| | | GTGGATTTTAACAGAATCCACGGGAGGAATCGGGTCCATGTCCACCC | | | |
| | | AAGCCAAGGTTAAAAGCCCACTCATCTACGGATGAGAAAATCATTTG | | | |
| | | ATCACCTCAGTTAAGCGCTGCCTTATTTTAACTTAATTAATAGGGGGG | | | |
| | | AGAGAGATTGGAGACTTACTATTGAAAGGGCAAGCCCTTCACTGCCT | | | |
| | | CCCACCCAAATAAAAAAGCCAATTGGCCTTGTACTACAGAGCTGGCC | | | |
| | | GGACCCCTTATCCCTGTTACCCACCAATCATCCAAAAATGCGGAGGAA | | | |
| | | TATCAACTTAGTGTTATTCTTATTATAGTGTATTTCACACTTGTTCAGTC | | | |
| | | AAACTTAGCCAGAGTTCCAACGCCCTACTTAAAATTCAACTAGAAAGT | | | |
| | | TACCTACCAAGTACTAATTAGCATTATAAAGTCAGAGCCTACAGCTCC | | | |
| | | AGGCTTTTCAGTTAGTTGTTTACTAAGATAAGAAAAGACAGTCTTAGC | | | |
| | | CAGATACAGTTTACCATAATAAAAGTTAAAGAATCCCAGGGAAGCAA | | | |
| | | GTTTTTTCTTTTAGCCCTAGATTCCAGGCAGAACTATTGAGCATAGAT | | | |
| | | AATTTTTCCCCCTCAGGCCAGCTTTTTCTTTTTTTTTAATTTTGTTAATA | | | |
| | | AAAGGGAGGAGATGTAGTCTCCCCTCCCCCAGCCTGAAACCTGCTTG | | | |
| | | CTCAGGGGTGGAGCTTCCCGCTCATCGCTCTGCCACGCCCACTGCTG | | | |
| | | GAACCTGCGGAGCCACACACGTGCACCTTTCTACTGGACCAGAGATT | | | |
| | | ATTCGGCGGGAATCGGGTCCCCTCCCCCTTCCTTCATAACTAGTGTCC | | | |
| | | CAACAATAAAATTTGAGCTTTGATCAGAATGAATTTGTCTTGGCTCCG | | | |
| | | TTTCTTCTTTCGCCCCGTCTAGATTCCTCTCTTACAGCTCGAGTGGCCT | | | |
| | | TCTCAGTCGAACCGTTCACGTTGCGAGCTGCTGGCGGCCGCAACAGG | | | |
| | | GGATCCAGACATGATAAGATACATTGATGAGTTTGGACAAACCACAA | | | |
| | | CTAGAATGCAGTGAAAAAAATGCTTTATTTGTGAAATTTGTGATGCTA | | | |
| | | TTGCTTTATTTGTAACCATTATAAGCTGCAATAAACAAGTTAACAACA | | | |
| | | ACAATTGCATTCATTTTATGTTTCAGGTTCAGGGGGAGGTGTGGGAG | | | |
| | | GTTTTTTCGGATCCTCTAGAGTCGACCTGCAGGCATGCAAGCTTGGCG | | | |
| | | TAATCATGGTCATAGCTGTTTCCTGTGTGAAATTGTTATCCGCTCACAA | | | |
| | | TTCCACACAACATACGAGCCGGAAGCATAAAGTGTAAAGCCTGGGGT | | | |
| | | GCCTAATGAGTGAGCTAACTCACATTAATTGCGTTGCGCTCACTGCCC | | | |
| | | GCTTTCCAGTCGGGAAACCTGTCGTGCCAGCTGCATTAATGAATCGG | | | |
| | | CCAACGCGCGGGGAGAGGCGGTTTGCGTATTGGGCGCTCTTCCGCTT | | | |
| | | CCTCGCTCACTGACTCGCTGCGCTCGGTCGTTCGGCTGCGGCGAGCG | | | |
| | | GTATCAGCTCACTCAAAGGCGGTAATACGGTTATCCACAGAATCAGG | | | |
| | | GGATAACGCAGGAAAGAACATGTGAGCAAAAGGCCAGCAAAAGGCC | | | |
| | | AGGAACCGTAAAAAGGCCGCGTTGCTGGCGTTTTTCCATAGGCTCCG | | | |
| | | CCCCCCTGACGAGCATCACAAAAATCGACGCTCAAGTCAGAGGTGGC | | | |
| | | GAAACCCGACAGGACTATAAAGATACCAGGCGTTTCCCCCTGGAAGC | | | |
| | | TCCCTCGTGCGCTCTCCTGTTCCGACCCTGCCGCTTACCGGATACCTGT | | | |
| | | CCGCCTTTCTCCCTTCGGGAAGCGTGGCGCTTTCTCATAGCTCACGCT | | | |
| | | GTAGGTATCTCAGTTCGGTGTAGGTCGTTCGCTCCAAGCTGGGCTGT | | | |
| | | GTGCACGAACCCCCCGTTCAGCCCGACCGCTGCGCCTTATCCGGTAAC | | | |
| | | TATCGTCTTGAGTCCAACCCGGTAAGACACGACTTATCGCCACTGGCA | | | |
| | | GCAGCCACTGGTAACAGGATTAGCAGAGCGAGGTATGTAGGCGGTG | | | |
| | | CTACAGAGTTCTTGAAGTGGTGGCCTAACTACGGCTACACTAGAAGG | | | |
| | | ACAGTATTTGGTATCTGCGCTCTGCTGAAGCCAGTTACCTTCGGAAAA | | | |
| | | AGAGTTGGTAGCTCTTGATCCGGCAAACAAACCACCGCTGGTAGCGG | | | |
| | | TGGTTTTTTTGTTTGCAAGCAGCAGATTACGCGCAGAAAAAAAGGAT | | | |
| | | CTCAAGAAGATCCTTTGATCTTTTCTACGGGGTCTGACGCTCAGTGGA | | | |
| | | ACGAAAACTCACGTTAAGGGATTTTGGTCATGAGATTATCAAAAAGG | | | |
| | | ATCTTCACCTAGATCCTTTTAAATTAAAAATGAAGTTTTAAATCAATCT | | | |
| | | AAAGTATATATGAGTAAACTTGGTCTGACAGTTACCAATGCTTAATCA | | | |
| | | GTGAGGCACCTATCTCAGCGATCTGTCTATTTCGTTCATCCATAGTTG | | | |
| | | CCTGACTCCCCGTCGTGTAGATAACTACGATACGGGAGGGCTTACCA | | | |
| | | TCTGGCCCCAGTGCTGCAATGATACCGCGAGACCCACGCTCACCGGC | | | |
| | | TCCAGATTTATCAGCAATAAACCAGCCAGCCGGAAGGGCCGAGCGCA | | | |
| | | GAAGTGGTCCTGCAACTTTATCCGCCTCCATCCAGTCTATTAATTGTTG | | | |
| | | CCGGGAAGCTAGAGTAAGTAGTTCGCCAGTTAATAGTTTGCGCAACG | | | |
| | | TTGTTGCCATTGCTACAGGCATCGTGGTGTCACGCTCGTCGTTTGGTA | | | |
| | | TGGCTTCATTCAGCTCCGGTTCCCAACGATCAAGGCGAGTTACATGAT | | | |
| | | CCCCCATGTTGTGCAAAAAAGCGGTTAGCTCCTTCGGTCCTCCGATCG | | | |
| | | TTGTCAGAAGTAAGTTGGCCGCAGTGTTATCACTCATGGTTATGGCA | | | |
| | | GCACTGCATAATTCTCTTACTGTCATGCCATCCGTAAGATGCTTTTCTG | | | |
| | | TGACTGGTGAGTACTCAACCAAGTCATTCTGAGAATAGTGTATGCGG | | | |
| | | CGACCGAGTTGCTCTTGCCCGGCGTCAATACGGGATAATACCGCGCC | | | |
| | | ACATAGCAGAACTTTAAAAGTGCTCATCATTGGAAAACGTTCTTCGGG | | | |
| | | GCGAAAACTCTCAAGGATCTTACCGCTGTTGAGATCCAGTTCGATGTA | | | |
| | | ACCCACTCGTGCACCCAACTGATCTTCAGCATCTTTTACTTTCACCAGC | | | |
| | | GTTTCTGGGTGAGCAAAAACAGGAAGGCAAAATGCCGCAAAAAAGG | | | |
| | | GAATAAGGGCGACACGGAAATGTTGAATACTCATACTCTTCCTTTTTC | | | |
| | | AATATTATTGAAGCATTTATCAGGGTTATTGTCTCATGAGCGGATACA | | | |
| | | TATTTGAATGTATTTAGAAAAATAAACAAATAGGGGTTCCGCGCACAT | | | |
| | | TTCCCCGAAAAGTGCCACCTGACGTCTAAGAAACCATTATTATCATGA | | | |
| | | CATTAACCTATAAAAATAGGCGTATCACGAGGCCCTTTCGTCTCGCGC | | | |
| | | GTTTCGGTGATGACGGTGAAAACCTCTGACACATGCAGCTCCCGGAG | | | |
| | | ACGGTCACAGCTTGTCTGTAAGCGGATGCCGGGAGCAGACAAGCCC | | | |
| | | GTCAGGGCGCGTCAGCGGGTGTTGGCGGGTGTCGGGGCTGGCTTAA | | | |
| | | CTATGCGGCATCAGAGCAGATTGTACTGAGAGTGCACCATATGCGGT | | | |
| | | GTGAAATACCGCACAGATGCGTAAGGAGAAAATACCGCATCAGGCG | | | |
| | | CCATTCGCCATTCAGGCTGCGCAACTGTTGGGAAGGGCGATCGGTGC | | | |
| | | GGGCCTCTTCGCTATTACGCCAGCTGGCGAAAGGGGGATGTGCTGCA | | | |
| | | AGGCGATTAAGTTGGGTAACGCCAGGGTTTTCCCAGTCACGACGTTG | | | |
| | | TAAAACGACGGCCAGT | | | |
| DRIVER_ | PLV10054 | GAATTCGAGCTTGCATGCCTGCAGGTCGTTACATAACTTACGGTAAAT | 322 | N/A | |
| pCMV_R- | | GGCCCGCCTGGCTGACCGCCCAACGACCCCCGCCCATTGACGTCAAT | | | |
| U5-PBS*- | | AATGACGTATGTTCCCATAGTAACGCCAATAGGGACTTTCCATTGACG | | | |
| MusD6- | | TCAATGGGTGGAGTATTTACGGTAAACTGCCCACTTGGCAGTACATC | | | |
| LTR_v3 | | AAGTGTATCATATGCCAAGTACGCCCCCTATTGACGTCAATGACGGTA | | | |
| | | AATGGCCCGCCTGGCATTATGCCCAGTACATGACCTTATGGGACTTTC | | | |
| | | CTACTTGGCAGTACATCTACGTATTAGTCATCGCTATTACCATGGTGA | | | |
| | | TGCGGTTTTGGCAGTACATCAATGGGCGTGGATAGCGGTTTGACTCA | | | |
| | | CGGGGATTTCCAAGTCTCCACCCCATTGACGTCAATGGGAGTTTGTTT | | | |
| | | TGGCACCAAAATCAACGGGACTTTCCAAAATGTCGTAACAACTCCGCC | | | |
| | | CCATTGACGCAAATGGGCGGTAGGCGTGTACGGTGGGAGGTCTATA | | | |
| | | TAAGCAGAGCTGAGCTTTGATCAGAATGAATTTGTCTTGGCTCCGTTT | | | |
| | | CTTCTTTCGCCCCGTCTAGATTCCTCTCTTACAGCTCGAGTGGCCTTCT | | | |
| | | CAGTCGAACCGTTCACGTTGCGAGCTGCTGGCGGCCGCAACATTTTA | | | |
| | | GCGACTAAACACATCACTGAAGAATCCGAGAGAGATGCTAAGAGGA | | | |
| | | ACGCTGCTTTGGAGCTCCACAGGAAAGGATCTTCGTATCGGACATCG | | | |
| | | GAGCAACGGACAGGTACACATGCTAGCGCTAGCTTAAAATTTCAGTT | | | |
| | | TTGTAAAGTGTTGCTGAGGATGTGGTAGGATACGAATTAAGCTTGAA | | | |
| | | TCAGTGCTAACCCAACGCTGGTTCTGCTTGGGTCAGCAGCGTGTTAAT | | | |
| | | CGGAACTAGAAACGGAAACAGGCAGGTTAGCCGCAGCTTTTTAGGA | | | |
| | | AGCTGCTTAGGTGGAAGAAGAAAGGGTTTAAAGTCATGGATCAGGC | | | |
| | | GGTTGCCCATAGTTTTCAGGAGTTGTTTCAGGCCAGAGGAGTAAGGC | | | |
| | | TTGAAGTACAATTAGTAAAAAATTTTTTAGGTAAGATAGATAGCTGTT | | | |
| | | GCCCATGGTTCAAGGAAGAAGAAACACTAGATTGTGGAACCTGGGA | | | |
| | | GAAAGTTGGTGAGGCCTTAAAAATCACTCAGGCAGATAATTTTACCCT | | | |
| | | AGGCCTCTGGGCACTCATAAATGATGCAATAAAAGATGCCACTTCCCC | | | |
| | | AGGGCTAAGTTGCCCCCAGGCGGAGCTTGTGGTATCTCAGGAGGAG | | | |
| | | TGCCTGTCAGAGAGGGCCTCCTCAGAAAAAGATCTTCTTAACTCAAAA | | | |
| | | ATTGATAAATGTGGAAACTCGGATGAAAAACTGATTTTTAACAAAAA | | | |
| | | TCACTCAGATAGAGGAGCTGCCCATTACCTTAATGAGAATTGGTCCTC | | | |
| | | TTGTGAATCTCCTGCTCAACCTGTAGTCCCCACTTCGGGAGGTGCCAC | | | |
| | | TCATAGGGACACACGACTAAGCGAGTTAGAGTTTGAGATTAAGCTTC | | | |
| | | AGAGGCTGACTAATGAGCTTCGGGAACTAAAAAAGATGTCAGAAGC | | | |
| | | GGAGAAGAGTAACTCTTCTGTAGTTCACCAGGTGCCGCTAGAAAAGG | | | |
| | | TTGTGAGTCAGGCTCATGGGAAAGGACAGAATATCTCTAATACGCTA | | | |
| | | GCCTTTCCTGTGGTTGAGGTAGTTGATCAGCAAGATACTAGGGGCAG | | | |
| | | ACATTACCAGACCTTAGATTTCAAGTTGATAAAAGAGTTAAAGGCGG | | | |
| | | CTGTTGTGCAATATGGCCCTTCAGCCCCATTCACTCAAGCATTACTGG | | | |
| | | ACACAGTTGTGGAGTCACACTTAACCCCTTTAGATTGGAAGACTCTTT | | | |
| | | CTAAGGCTACCCTGTCAGGAGGAGATTTTTTGCTTTGGGATTCTGAAT | | | |
| | | GGCGAGACGCCAGTAAGAAAACTGCTGCTTCTAACGCTCAGGCTGGT | | | |
| | | AATTCAGACTGGGATAGCAACATGCTTTTAGGAGAGGGCCCTTATGA | | | |
| | | GGGACAGACAAATCAGATTGATTTTCCCGTTGCAGTGTACGCGCAAA | | | |
| | | TTGCGACGGCCGCACGCCGTGCTTGGGGAAGGTTGCCAGTCAAAGG | | | |
| | | AGAGATTGGTGGAAGTTTAGCTAGCATTCGGCAGAGTTCTGATGAAC | | | |
| | | CATATCAGGATTTTGTGGACAGGCTATTGATTTCAGCTAGTAGAATCC | | | |
| | | TTGGAAATCCGGACACGGGAAGTCCTTTCGTTATGCAATTGGCTTATG | | | |
| | | AGAATGCTAACGCAATTTGCCGAGCTGCGATTCAACCGCATAAGGGA | | | |
| | | ACGACAGATTTGGCGGGATATGTCCGTCTTTGCGCAGACATCGGGCC | | | |
| | | TTCCTGCGAGACCTTGCAGGGAACCCACGCGCAGGCAATGTTCTCTA | | | |
| | | GGAAACGAGGGAATAGTGCATGCTTTAAATGTGGAAGTTTAGATCAT | | | |
| | | TTTAGAATTGATTGTCCTCAGAACAAGGGCGCCGAGGTTAGACAAAC | | | |
| | | AGGCCGTGCCCCGGGAATATGTCCCCGATGTGGAAAGGGCCGCCACT | | | |
| | | GGGCGAAAGATTGCAAGCATAAAACGAGGGTTTTGAGCCGCCCGGT | | | |
| | | GCCGGGAAACGAGGAAAGGGGTCAGCCCCAGGCCCCAAGTTACTCA | | | |
| | | AAGAAGACAGCTTATGGGGCTCTAAATCTGCTGCCCAGCCAACAAGA | | | |
| | | TCAGTTCTTGAGCTTGTCAGGTCAAACCCAGGAAACGCAAGACTGGA | | | |
| | | CCTCTGTTCCACTGTCCATGCAGCATTAACCCCAGAAGTGGGAGTCCA | | | |
| | | AACTCTGCCTACCGGAGTCTTTGGACCACTACCTGTAGGAACCTGTGG | | | |
| | | TTTTCTCTTAGGACGAAGCAGTTCTATTGTAGAAGGCCTGCAGATTTA | | | |
| | | TCCAGGTGTTATAAGTAATGATTATGAGGGAGAAATTAAAATCATAG | | | |
| | | CCGCTTGCCCTCGTGGTGCTATAACTATACCCGCTAATCAGAAAATTG | | | |
| | | CTCAACTTACCTTGATCCCCTTGCGCTGGTCACTATCTAAATTCTCTAA | | | |
| | | AAATGAAGAAGGACAGATTAACTTTGACTCCTCTGGCGTAAATTGGG | | | |
| | | TGAAATCTATCACTAATCAGAGACCTAACCTTAAATTGATTCTTGATG | | | |
| | | GAAAAAGCTTTGAAGGATTAATAGATACCGGGGCCGATGTAACCATT | | | |
| | | ATTAGAGGGCAGGACTGGCCCTCAAACTGGCCCCTGTCTGTTTCCTTG | | | |
| | | ACTCACCTTCAAGGAATTGGTTATGCCAGTAACCCAAAACGTAGTTCC | | | |
| | | AAATTGCTAACCTGGAGAGATGAGGATGGAAAATCAGGAAATATTCA | | | |
| | | GCCGTATGTTATGCAAAATTTGCCTGTAACCCTGTGGGGAAGAGATC | | | |
| | | TGTTGTCACAGATGGGCGTTATCCTGTGCAGTTCTAAGGAAATGGTG | | | |
| | | ACTGAACAGACGTTCAGGCAGGGACCCCTGCCTGATCGTGGACTAAT | | | |
| | | AAAGAAGGGACAGAAAATTAAGACTTTTGAAGATCTTAAACCCCACT | | | |
| | | CTAACGTGAGAGGTTTAAAGTATTTTCAGTAGTGGCCGCTGTCTTGCC | | | |
| | | TGCATCCCACGCCGAAAAAATTCAATGGCGTAATGATATTCCGGTGT | | | |
| | | GGGTAGATCAGTGGTCTTTACCTAAAGAGAAAATAGAGGCCGCTTCT | | | |
| | | CTGCTAGTGCAGGAGCAGTTAGAAGCAGGACATTTGGTGGAGTCTCA | | | |
| | | TTCTCCCTGGAATACACCCATTTTCATTATCAGGAAGAAATCGGGAAA | | | |
| | | ATGGAGACTGTTGCAAGATTTAAGAAAGGTTAATGAAACCATGGTAC | | | |
| | | TTATGGGAACTTTACAACCGGGGCTCCCCTCCCCAGTAGCCATTCCTA | | | |
| | | AGGGATACTATAAGATTGTTATAGATTTGAAAGATTGTTTCTTTACCA | | | |
| | | TCCCTTTGCATCCAGAGGATTGTGAGAGATTTGCTTTTAGTGTTCCTTC | | | |
| | | TGTAAATTTCAAGGAACCCATGAAAAGATATCAATGGACAGTTCTCCC | | | |
| | | GCAGGGGATGGCTAATAGTCCCACCTTATGTCAAAAGTTTGTGGCAA | | | |
| | | AGGCAATTCAGCCTGTTAGACAACAATGGCCAAATATTTACATCATTC | | | |
| | | ATTTCACAGATGATGTTTTGATGGCGGGAAAGGACCCCCAAGATTTG | | | |
| | | CTTTTGTGTTATGGAGACTTACGAAAGGCCCTGGCTGATAAGGGATT | | | |
| | | ACAAATTGCTTCTGAAAAGATACAAACTCAGGATCCTTATAATTATTT | | | |
| | | GGGTTTTAGACTCACTGACCAAGCTGTTTTTCACCAGAAAATTGTTAT | | | |
| | | TCGTAGAGATAACTTAAGGACCTTAAATGATTTTCAAAAATTGTTAGG | | | |
| | | TGATATAAACTGGCTTCGCCCCTATCTAAAGCTTACTACAGGGGAGTT | | | |
| | | GAAACCTTTATTTGATATTCTTAAAGGGAGTTCTGATCCTACTTCCCCT | | | |
| | | AGATCCCTAACCTCAGAAGGTTTACTGGCCTTACAGCTAGTGGAAAA | | | |
| | | GGCTATTGAAGAACAGTTTGTCACTTACATAGATTACTCCCTGCCGCT | | | |
| | | GCACCTGTTAATTTTTAACACGACTCATGTGCCTACGGGATTGCTATG | | | |
| | | GCAAAAATTTCCTATAATGTGGATACATTCAAGGATTTCTCCCAAACG | | | |
| | | TAATATTTTGCCATATCATGAAGCAGTGGCTCAGATGATTATCACTGG | | | |
| | | AAGAAGGCAGGCATTGACTTATTTTGGAAAGGAGCCAGATATCATTG | | | |
| | | TCCAGCCTTACAGCGTGAGTCAGGACACTTGGCTGAAACAGCATAGT | | | |
| | | ACAGATTGGTTGCTTGCACAATTAGGGTTTGAAGGAACTATAGATAG | | | |
| | | CCACTACCCCCAAGATAGGTTGATAAAATTCTTAAATGTACATGATAT | | | |
| | | GATATTTCCTAAGATGACTTCCTTACAGCCTTTAAATAATGCTCTATTG | | | |
| | | ATTTTTACTGATGGCTCCTCTAAAGGGCGAGCTGGATATCTTATTAGT | | | |
| | | AATCAACAGGTTATCGTAGAGACTCCTGGTCTCTCGGCTCAGCTCGCC | | | |
| | | GAACTAACAGCAGTACTGAAGGTTTTTCAGTCTGTACAGGAGGCTTTT | | | |
| | | AATATTTTTACTGACAGTTTATATGTTGCTCAGTCAGTACCCTTATTGG | | | |
| | | AAACCTGTGGTACTTTTAACTTCAATACGCCGTCAGGATCTTTATTTTC | | | |
| | | AGAATTACAAAACATCATTCTCGCCCGGAAAAATCCGTTTTATATTGG | | | |
| | | CCACATACGGTCTCACTCTGGTCTTCCTGGACCTCTGGCAGAGGGTAA | | | |
| | | TAATTGCATTGACAGAGCTCTAATAGGAGAAGCCTTAGTTTCAGATCG | | | |
| | | GGTTGCTTTGGCCCAACGTGATCATGAAAGGTTTCATCTCTCTAGCCA | | | |
| | | TACCCTAAGGCTCCGACATAAGATCACCAAGGAGCAAGCGAGAATGA | | | |
| | | TTGTAAAACAATGTCCTAAATGTATTACTTTATCTCCAGTGCCGCATCT | | | |
| | | AGGAGTTAATCCTAGAGGCCTTATGCCTAATCATATTTGGCAAATGGA | | | |
| | | TATAACCCATTATGCAGAATTTGGAAAACTAAAATATATACATGTTTG | | | |
| | | CATTGATACTTGTTCAGGATTTCTCTTTGCTTCTCTGCATACAGGAGAA | | | |
| | | GCTTCAAAAAACGTAATTGATCATTGCCTACAAGCATTTAATGCCATG | | | |
| | | GGATTACCTAAACTTATTAAGACAGACAATGGGCCATCTTATTCCAGT | | | |
| | | AAAAACTTTATTTCATTCTGTAAAGAATTCGGTATTAAACATAAAACT | | | |
| | | GGAATTCCTTACAACCCCATGGGACAAGGAATAGTTGAACGTGCTCA | | | |
| | | TCGCACCTTAAAGAATTGGCTCTTTAAGACAAAAGAGGGGCAGCTAT | | | |
| | | ATCCCCCAAGGTCTCCAAAGGCCCACCTTGCCTTCACCTTATTTGTCCT | | | |
| | | AAATTTCTTGCACACCGATATCAAGGGCCAGTCTGCAGCGGATCGCC | | | |
| | | ACTGGCATCCAGTTACTTCTAATTCTTATGCATTGGTAAAATGGAAGG | | | |
| | | ACCCCCTGACTAATGAATGGAAGGGTCCAGATCCAGTTCTAATTTGG | | | |
| | | GGTAGAGGCTCAGTTTGTGTTTTTTCACGAGATGAAGATGGAGCACG | | | |
| | | GTGGCTGCCAGAGAGATTAATTCGTCAGACGAACACAGATTCTGACT | | | |
| | | CTTCTGGTAAGTATCATTCTAAAGACTAAAATTCCTTTTGTGCTTAAAA | | | |
| | | TTCAGCTGAGAGCAACAGCTCTCAAAGCTGTTCTCCAGCTACTCTCTG | | | |
| | | AGCCAGCTCCCGACAGGAGGCCGGAGACTAGCCTCAGCTTTACAATT | | | |
| | | TGCATTTAAATAAAGTACCTAGACTTCCCCGAAAAAAGTTCTGCTTTTC | | | |
| | | TACTTTCTCACTGTCTTTCAAGATTTTGTCTTTCAAGCAGGTAAATCAA | | | |
| | | CATTCTCGAGGCGGACCAGCGGATGTGCATCCCCGCCCCCCTAGAGC | | | |
| | | ACTCAGGTGGCAGCTGTTATCCCCAGTCTCAGGACATTCCAGCATGTG | | | |
| | | GCCTTCAGTCTGAGTTAAAAATTAGGTTTACCCAGAGGACTAGAATA | | | |
| | | GTAGATATTTCTATATTAATAAAGATTGGTTTTTATTTTGATAGACAGG | | | |
| | | CTTAGCCCCTTAGCTGACCTCTGGCTTTTCACCCTTGCTGTTACTGCAA | | | |
| | | GGTGTCTTTAGCTCAATAAGGCTGTGGAAAAAAACAGGGATGAGGA | | | |
| | | GGAACGGCTCCCAGCTCCTATTTTAGCCACAAATCGTGGTGTTACTAA | | | |
| | | CGACATAATTCTTGCTTAGGCTTTGCTAAATCTGAGGTTGATAATTCTC | | | |
| | | CTTTAGGAGCTGCACAGCGCTCAGAACTGTGCATACTGATTTGTGATG | | | |
| | | GTACAAATTCAGTATGGGCATCGCTTGGTGCAGATGGAGGTACTGCA | | | |
| | | AGGAAAGGTCCCAGCTTGACCATTTCTGAGTTTCCTGTGAGATAAACC | | | |
| | | CGGTTTGAAAGAGGTTGGTACCAAATTATATATCCCTCGGCTCTACCT | | | |
| | | CGCCTCCCCAAAAGGTACCAGAGCCACAGGTGTGGATTTTAACAGAA | | | |
| | | TCCACGGGAGGAATCGGGTCCATGTCCACCCAAGCCAAGGTTAAAAG | | | |
| | | CCCACTCATCTACGGATGAGAAAATCATTTGATCACCTCAGTTAAGCG | | | |
| | | CTGCCTTATTTTAACTTAATTAATAGGGGGGAGAGAGATTGGAGACT | | | |
| | | TACTATTGAAAGGGCAAGCCCTTCACTGCCTCCCACCCAAATAAAAAA | | | |
| | | GCCAATTGGCCTTGTACTACAGAGCTGGCCGGACCCCTTATCCCTGTT | | | |
| | | ACCCACCAATCATCCAAAAATGCGGAGGAATATCAACTTAGTGTTATT | | | |
| | | CTTATTATAGTGTATTTCACACTTGTTCAGTCAAACTTAGCCAGAGTTC | | | |
| | | CAACGCCCTACTTAAAATTCAACTAGAAAGTTACCTACCAAGTACTAA | | | |
| | | TTAGCATTATAAAGTCAGAGCCTACAGCTCCAGGCTTTTCAGTTAGTT | | | |
| | | GTTTACTAAGATAAGAAAAGACAGTCTTAGCCAGATACAGTTTACCAT | | | |
| | | AATAAAAGTTAAAGAATCCCAGGGAAGCAAGTTTTTTCTTTTAGCCCT | | | |
| | | AGATTCCAGGCAGAACTATTGAGCATAGATAATTTTTCCCCCTCAGGC | | | |
| | | CAGCTTTTTCTTTTTTTTTAATTTTGTTAATAAAAGGGAGGAGATGTAG | | | |
| | | TCTCCCCTCCCCCAGCCTGAAACCTGCTTGCTCAGGGGTGGAGCTTCC | | | |
| | | CGCTCATCGCTCTGCCACGCCCACTGCTGGAACCTGCGGAGCCACAC | | | |
| | | ACGTGCACCTTTCTACTGGACCAGAGATTATTCGGCGGGAATCGGGT | | | |
| | | CCCCTCCCCCTTCCTTCATAACTAGTGTCCCAACAATAAAATTTGAGCT | | | |
| | | TTGATCAGAATGAATTTGTCTTGGCTCCGTTTCTTCTTTCGCCCCGTCT | | | |
| | | AGATTCCTCTCTTACAGCTCGAGTGGCCTTCTCAGTCGAACCGTTCAC | | | |
| | | GTTGCGAGCTGCTGGCGGCCGCAACAGGGGATCCAGACATGATAAG | | | |
| | | ATACATTGATGAGTTTGGACAAACCACAACTAGAATGCAGTGAAAAA | | | |
| | | AATGCTTTATTTGTGAAATTTGTGATGCTATTGCTTTATTTGTAACCAT | | | |
| | | TATAAGCTGCAATAAACAAGTTAACAACAACAATTGCATTCATTTTAT | | | |
| | | GTTTCAGGTTCAGGGGGAGGTGTGGGAGGTTTTTTCGGATCCTCTAG | | | |
| | | AGTCGACCTGCAGGCATGCAAGCTTGGCGTAATCATGGTCATAGCTG | | | |
| | | TTTCCTGTGTGAAATTGTTATCCGCTCACAATTCCACACAACATACGA | | | |
| | | GCCGGAAGCATAAAGTGTAAAGCCTGGGGTGCCTAATGAGTGAGCT | | | |
| | | AACTCACATTAATTGCGTTGCGCTCACTGCCCGCTTTCCAGTCGGGAA | | | |
| | | ACCTGTCGTGCCAGCTGCATTAATGAATCGGCCAACGCGCGGGGAGA | | | |
| | | GGCGGTTTGCGTATTGGGCGCTCTTCCGCTTCCTCGCTCACTGACTCG | | | |
| | | CTGCGCTCGGTCGTTCGGCTGCGGCGAGCGGTATCAGCTCACTCAAA | | | |
| | | GGCGGTAATACGGTTATCCACAGAATCAGGGGATAACGCAGGAAAG | | | |
| | | AACATGTGAGCAAAAGGCCAGCAAAAGGCCAGGAACCGTAAAAAGG | | | |
| | | CCGCGTTGCTGGCGTTTTTCCATAGGCTCCGCCCCCCTGACGAGCATC | | | |
| | | ACAAAAATCGACGCTCAAGTCAGAGGTGGCGAAACCCGACAGGACT | | | |
| | | ATAAAGATACCAGGCGTTTCCCCCTGGAAGCTCCCTCGTGCGCTCTCC | | | |
| | | TGTTCCGACCCTGCCGCTTACCGGATACCTGTCCGCCTTTCTCCCTTCG | | | |
| | | GGAAGCGTGGCGCTTTCTCATAGCTCACGCTGTAGGTATCTCAGTTCG | | | |
| | | GTGTAGGTCGTTCGCTCCAAGCTGGGCTGTGTGCACGAACCCCCCGT | | | |
| | | TCAGCCCGACCGCTGCGCCTTATCCGGTAACTATCGTCTTGAGTCCAA | | | |
| | | CCCGGTAAGACACGACTTATCGCCACTGGCAGCAGCCACTGGTAACA | | | |
| | | GGATTAGCAGAGCGAGGTATGTAGGCGGTGCTACAGAGTTCTTGAA | | | |
| | | GTGGTGGCCTAACTACGGCTACACTAGAAGGACAGTATTTGGTATCT | | | |
| | | GCGCTCTGCTGAAGCCAGTTACCTTCGGAAAAAGAGTTGGTAGCTCT | | | |
| | | TGATCCGGCAAACAAACCACCGCTGGTAGCGGTGGTTTTTTTGTTTGC | | | |
| | | AAGCAGCAGATTACGCGCAGAAAAAAAGGATCTCAAGAAGATCCTTT | | | |
| | | GATCTTTTCTACGGGGTCTGACGCTCAGTGGAACGAAAACTCACGTTA | | | |
| | | AGGGATTTTGGTCATGAGATTATCAAAAAGGATCTTCACCTAGATCCT | | | |
| | | TTTAAATTAAAAATGAAGTTTTAAATCAATCTAAAGTATATATGAGTA | | | |
| | | AACTTGGTCTGACAGTTACCAATGCTTAATCAGTGAGGCACCTATCTC | | | |
| | | AGCGATCTGTCTATTTCGTTCATCCATAGTTGCCTGACTCCCCGTCGTG | | | |
| | | TAGATAACTACGATACGGGAGGGCTTACCATCTGGCCCCAGTGCTGC | | | |
| | | AATGATACCGCGAGACCCACGCTCACCGGCTCCAGATTTATCAGCAAT | | | |
| | | AAACCAGCCAGCCGGAAGGGCCGAGCGCAGAAGTGGTCCTGCAACT | | | |
| | | TTATCCGCCTCCATCCAGTCTATTAATTGTTGCCGGGAAGCTAGAGTA | | | |
| | | AGTAGTTCGCCAGTTAATAGTTTGCGCAACGTTGTTGCCATTGCTACA | | | |
| | | GGCATCGTGGTGTCACGCTCGTCGTTTGGTATGGCTTCATTCAGCTCC | | | |
| | | GGTTCCCAACGATCAAGGCGAGTTACATGATCCCCCATGTTGTGCAA | | | |
| | | AAAAGCGGTTAGCTCCTTCGGTCCTCCGATCGTTGTCAGAAGTAAGTT | | | |
| | | GGCCGCAGTGTTATCACTCATGGTTATGGCAGCACTGCATAATTCTCT | | | |
| | | TACTGTCATGCCATCCGTAAGATGCTTTTCTGTGACTGGTGAGTACTC | | | |
| | | AACCAAGTCATTCTGAGAATAGTGTATGCGGCGACCGAGTTGCTCTT | | | |
| | | GCCCGGCGTCAATACGGGATAATACCGCGCCACATAGCAGAACTTTA | | | |
| | | AAAGTGCTCATCATTGGAAAACGTTCTTCGGGGCGAAAACTCTCAAG | | | |
| | | GATCTTACCGCTGTTGAGATCCAGTTCGATGTAACCCACTCGTGCACC | | | |
| | | CAACTGATCTTCAGCATCTTTTACTTTCACCAGCGTTTCTGGGTGAGCA | | | |
| | | AAAACAGGAAGGCAAAATGCCGCAAAAAAGGGAATAAGGGCGACA | | | |
| | | CGGAAATGTTGAATACTCATACTCTTCCTTTTTCAATATTATTGAAGCA | | | |
| | | TTTATCAGGGTTATTGTCTCATGAGCGGATACATATTTGAATGTATTT | | | |
| | | AGAAAAATAAACAAATAGGGGTTCCGCGCACATTTCCCCGAAAAGTG | | | |
| | | CCACCTGACGTCTAAGAAACCATTATTATCATGACATTAACCTATAAA | | | |
| | | AATAGGCGTATCACGAGGCCCTTTCGTCTCGCGCGTTTCGGTGATGA | | | |
| | | CGGTGAAAACCTCTGACACATGCAGCTCCCGGAGACGGTCACAGCTT | | | |
| | | GTCTGTAAGCGGATGCCGGGAGCAGACAAGCCCGTCAGGGCGCGTC | | | |
| | | AGCGGGTGTTGGCGGGTGTCGGGGCTGGCTTAACTATGCGGCATCA | | | |
| | | GAGCAGATTGTACTGAGAGTGCACCATATGCGGTGTGAAATACCGCA | | | |
| | | CAGATGCGTAAGGAGAAAATACCGCATCAGGCGCCATTCGCCATTCA | | | |
| | | GGCTGCGCAACTGTTGGGAAGGGCGATCGGTGCGGGCCTCTTCGCT | | | |
| | | ATTACGCCAGCTGGCGAAAGGGGGATGTGCTGCAAGGCGATTAAGT | | | |
| | | TGGGTAACGCCAGGGTTTTCCCAGTCACGACGTTGTAAAACGACGGC | | | |
| | | CAGT | | | |
| TEMPLATE_ | PLV10062 | GAATTCGAGCTTGCATGCCTGCAGGTCGTTACATAACTTACGGTAAAT | 323 | N/A | |
| COMPACT_ | | GGCCCGCCTGGCTGACCGCCCAACGACCCCCGCCCATTGACGTCAAT | | | |
| pCMV_ | | AATGACGTATGTTCCCATAGTAACGCCAATAGGGACTTTCCATTGACG | | | |
| R-U5- | | TCAATGGGTGGAGTATTTACGGTAAACTGCCCACTTGGCAGTACATC | | | |
| MusD6_ | | AAGTGTATCATATGCCAAGTACGCCCCCTATTGACGTCAATGACGGTA | | | |
| EF1-GFPai- | | AATGGCCCGCCTGGCATTATGCCCAGTACATGACCTTATGGGACTTTC | | | |
| LTR_v1 | | CTACTTGGCAGTACATCTACGTATTAGTCATCGCTATTACCATGGTGA | | | |
| | | TGCGGTTTTGGCAGTACATCAATGGGCGTGGATAGCGGTTTGACTCA | | | |
| | | CGGGGATTTCCAAGTCTCCACCCCATTGACGTCAATGGGAGTTTGTTT | | | |
| | | TGGCACCAAAATCAACGGGACTTTCCAAAATGTCGTAACAACTCCGCC | | | |
| | | CCATTGACGCAAATGGGCGGTAGGCGTGTACGGTGGGAGGTCTATA | | | |
| | | TAAGCAGAGCTCGTTTAGTGAACCGTCAGAGCTTTGATCAGAATGAA | | | |
| | | TTTGTCTTGGCTCCGTTTCTTCTTTCGCCCCGTCTAGATTCCTCTCTTAC | | | |
| | | AGCTCGAGTGGCCTTCTCAGTCGAACCGTTCACGTTGCGAGCTGCTG | | | |
| | | GCGGCCGCAACATTTTGGCGCCAGAACTGGGACCTGAAGAATGGCga | | | |
| | | acaaacgacccaacacccgtgcgttttattctgtctttttattgccgatcccccggccgcttta | | | |
| | | cttgtacagctcgtccatgccgagagtgatcccggcggcggtcacgaactccagcaggacc | | | |
| | | atgtgatcgcgcttctcgttggggtctttgctcagggcggactgggtgctcaggtaagtatca | | | |
| | | aggttacaagacaggtttaaggagaccaatagaaactgggcttgtcgagacagagaagac | | | |
| | | tcttgcgtttctgataggcacctattggtcttactgacatccactttgcctttctctccacaggt | | | |
| | | agtggttgtcgggcagcagcacggggccgtcgccgatgggggtgttctgctggtagtggtcg | | | |
| | | gcgagctgcacgctgccgtcctcgatgttgtggcggatcttgaagttcaccttgatgccgttc | | | |
| | | ttctgcttgtcggccatgatatagacgttgtggctgttgtagttgtactccagcttgtgcccca | | | |
| | | ggatgttgccgtcctccttgaagtcgatgcccttcagctcgatgcggttcaccagggtgtcgc | | | |
| | | cctcgaacttcacctcggcgcgggtcttgtagttgccgtcgtccttgaagaagatggtgcgct | | | |
| | | cctggacgtagccttcgggcatggcggacttgaagaagtcgtgctgcttcatgtggtcgggg | | | |
| | | tagcggctgaagcactgcacgccgtaggtcagggtggtcacgagggtgggccagggcacg | | | |
| | | ggcagcttgccggtggtgcagatgaacttcagggtcagcttgccgtaggtggcatcgccctc | | | |
| | | gccctcgccggacacgctgaacttgtggccgtttacgtcgccgtccagctcgaccaggatgg | | | |
| | | gcaccaccccggtgaacagctcctcgcccttgctcaccatggtggctttaccaacagtaccg | | | |
| | | gaatgccaagcttgggtcctgtgttctggcggcaaacccgttgcgaaaaagaacgttcacg | | | |
| | | gcgactactgcacttatatacggttctcccccaccctcgggaaaaaggcggagccagtaca | | | |
| | | cgacatcactttcccagtttaccccgcgccaccttctctaggcaccggatcaattgccgaccc | | | |
| | | ctccccccaacttctcggggactgtgggcgatgtgcgctctgcccTCAGGCCAGCTTTT | | | |
| | | TCTTTTTTTTTAATTTTGTTAATAAAAGGGAGGAGATGTAGTCTCCCCT | | | |
| | | CCCCCAGCCTGAAACCTGCTTGCTCAGGGGTGGAGCTTCCCGCTCATC | | | |
| | | GCTCTGCCACGCCCACTGCTGGAACCTGCGGAGCCACACACGTGCAC | | | |
| | | CTTTCTACTGGACCAGAGATTATTCGGCGGGAATCGGGTCCCCTCCCC | | | |
| | | CTTCCTTCATAACTAGTGTCCCAACAATAAAATTTGAGCTTTGATCAGA | | | |
| | | ATGAATTTGTCTTGGCTCCGTTTCTTCTTTCGCCCCGTCTAGATTCCTCT | | | |
| | | CTTACAGCTCGAGTGGCCTTCTCAGTCGAACCGTTCACGTTGCGAGCT | | | |
| | | GCTGGCGGCCGCAACAGGGGATCCAGACATGATAAGATACATTGAT | | | |
| | | GAGTTTGGACAAACCACAACTAGAATGCAGTGAAAAAAATGCTTTAT | | | |
| | | TTGTGAAATTTGTGATGCTATTGCTTTATTTGTAACCATTATAAGCTGC | | | |
| | | AATAAACAAGTTAACAACAACAATTGCATTCATTTTATGTTTCAGGTTC | | | |
| | | AGGGGGAGGTGTGGGAGGTTTTTTCGGATCCTCTAGAGTCGACCTGC | | | |
| | | AGGCATGCAAGCTTGGCGTAATCATGGTCATAGCTGTTTCCTGTGTG | | | |
| | | AAATTGTTATCCGCTCACAATTCCACACAACATACGAGCCGGAAGCAT | | | |
| | | AAAGTGTAAAGCCTGGGGTGCCTAATGAGTGAGCTAACTCACATTAA | | | |
| | | TTGCGTTGCGCTCACTGCCCGCTTTCCAGTCGGGAAACCTGTCGTGCC | | | |
| | | AGCTGCATTAATGAATCGGCCAACGCGCGGGGAGAGGCGGTTTGCG | | | |
| | | TATTGGGCGCTCTTCCGCTTCCTCGCTCACTGACTCGCTGCGCTCGGT | | | |
| | | CGTTCGGCTGCGGCGAGCGGTATCAGCTCACTCAAAGGCGGTAATAC | | | |
| | | GGTTATCCACAGAATCAGGGGATAACGCAGGAAAGAACATGTGAGC | | | |
| | | AAAAGGCCAGCAAAAGGCCAGGAACCGTAAAAAGGCCGCGTTGCTG | | | |
| | | GCGTTTTTCCATAGGCTCCGCCCCCCTGACGAGCATCACAAAAATCGA | | | |
| | | CGCTCAAGTCAGAGGTGGCGAAACCCGACAGGACTATAAAGATACC | | | |
| | | AGGCGTTTCCCCCTGGAAGCTCCCTCGTGCGCTCTCCTGTTCCGACCC | | | |
| | | TGCCGCTTACCGGATACCTGTCCGCCTTTCTCCCTTCGGGAAGCGTGG | | | |
| | | CGCTTTCTCATAGCTCACGCTGTAGGTATCTCAGTTCGGTGTAGGTCG | | | |
| | | TTCGCTCCAAGCTGGGCTGTGTGCACGAACCCCCCGTTCAGCCCGACC | | | |
| | | GCTGCGCCTTATCCGGTAACTATCGTCTTGAGTCCAACCCGGTAAGAC | | | |
| | | ACGACTTATCGCCACTGGCAGCAGCCACTGGTAACAGGATTAGCAGA | | | |
| | | GCGAGGTATGTAGGCGGTGCTACAGAGTTCTTGAAGTGGTGGCCTAA | | | |
| | | CTACGGCTACACTAGAAGGACAGTATTTGGTATCTGCGCTCTGCTGAA | | | |
| | | GCCAGTTACCTTCGGAAAAAGAGTTGGTAGCTCTTGATCCGGCAAAC | | | |
| | | AAACCACCGCTGGTAGCGGTGGTTTTTTTGTTTGCAAGCAGCAGATTA | | | |
| | | CGCGCAGAAAAAAAGGATCTCAAGAAGATCCTTTGATCTTTTCTACG | | | |
| | | GGGTCTGACGCTCAGTGGAACGAAAACTCACGTTAAGGGATTTTGGT | | | |
| | | CATGAGATTATCAAAAAGGATCTTCACCTAGATCCTTTTAAATTAAAA | | | |
| | | ATGAAGTTTTAAATCAATCTAAAGTATATATGAGTAAACTTGGTCTGA | | | |
| | | CAGTTACCAATGCTTAATCAGTGAGGCACCTATCTCAGCGATCTGTCT | | | |
| | | ATTTCGTTCATCCATAGTTGCCTGACTCCCCGTCGTGTAGATAACTAC | | | |
| | | GATACGGGAGGGCTTACCATCTGGCCCCAGTGCTGCAATGATACCGC | | | |
| | | GAGACCCACGCTCACCGGCTCCAGATTTATCAGCAATAAACCAGCCA | | | |
| | | GCCGGAAGGGCCGAGCGCAGAAGTGGTCCTGCAACTTTATCCGCCTC | | | |
| | | CATCCAGTCTATTAATTGTTGCCGGGAAGCTAGAGTAAGTAGTTCGCC | | | |
| | | AGTTAATAGTTTGCGCAACGTTGTTGCCATTGCTACAGGCATCGTGGT | | | |
| | | GTCACGCTCGTCGTTTGGTATGGCTTCATTCAGCTCCGGTTCCCAACG | | | |
| | | ATCAAGGCGAGTTACATGATCCCCCATGTTGTGCAAAAAAGCGGTTA | | | |
| | | GCTCCTTCGGTCCTCCGATCGTTGTCAGAAGTAAGTTGGCCGCAGTGT | | | |
| | | TATCACTCATGGTTATGGCAGCACTGCATAATTCTCTTACTGTCATGCC | | | |
| | | ATCCGTAAGATGCTTTTCTGTGACTGGTGAGTACTCAACCAAGTCATT | | | |
| | | CTGAGAATAGTGTATGCGGCGACCGAGTTGCTCTTGCCCGGCGTCAA | | | |
| | | TACGGGATAATACCGCGCCACATAGCAGAACTTTAAAAGTGCTCATC | | | |
| | | ATTGGAAAACGTTCTTCGGGGCGAAAACTCTCAAGGATCTTACCGCT | | | |
| | | GTTGAGATCCAGTTCGATGTAACCCACTCGTGCACCCAACTGATCTTC | | | |
| | | AGCATCTTTTACTTTCACCAGCGTTTCTGGGTGAGCAAAAACAGGAAG | | | |
| | | GCAAAATGCCGCAAAAAAGGGAATAAGGGCGACACGGAAATGTTGA | | | |
| | | ATACTCATACTCTTCCTTTTTCAATATTATTGAAGCATTTATCAGGGTT | | | |
| | | ATTGTCTCATGAGCGGATACATATTTGAATGTATTTAGAAAAATAAAC | | | |
| | | AAATAGGGGTTCCGCGCACATTTCCCCGAAAAGTGCCACCTGACGTC | | | |
| | | TAAGAAACCATTATTATCATGACATTAACCTATAAAAATAGGCGTATC | | | |
| | | ACGAGGCCCTTTCGTCTCGCGCGTTTCGGTGATGACGGTGAAAACCT | | | |
| | | CTGACACATGCAGCTCCCGGAGACGGTCACAGCTTGTCTGTAAGCGG | | | |
| | | ATGCCGGGAGCAGACAAGCCCGTCAGGGCGCGTCAGCGGGTGTTGG | | | |
| | | CGGGTGTCGGGGCTGGCTTAACTATGCGGCATCAGAGCAGATTGTAC | | | |
| | | TGAGAGTGCACCATATGCGGTGTGAAATACCGCACAGATGCGTAAG | | | |
| | | GAGAAAATACCGCATCAGGCGCCATTCGCCATTCAGGCTGCGCAACT | | | |
| | | GTTGGGAAGGGCGATCGGTGCGGGCCTCTTCGCTATTACGCCAGCTG | | | |
| | | GCGAAAGGGGGATGTGCTGCAAGGCGATTAAGTTGGGTAACGCCAG | | | |
| | | GGTTTTCCCAGTCACGACGTTGTAAAACGACGGCCAGT | | | |
| TEMPLATE_ | PLV10063 | GAATTCGAGCTTGCATGCCTGCAGGTCGTTACATAACTTACGGTAAAT | 324 | N/A | |
| COMPACT_ | | GGCCCGCCTGGCTGACCGCCCAACGACCCCCGCCCATTGACGTCAAT | | | |
| pCMV_ | | AATGACGTATGTTCCCATAGTAACGCCAATAGGGACTTTCCATTGACG | | | |
| R-U5- | | TCAATGGGTGGAGTATTTACGGTAAACTGCCCACTTGGCAGTACATC | | | |
| MusD6_ | | AAGTGTATCATATGCCAAGTACGCCCCCTATTGACGTCAATGACGGTA | | | |
| EF1-GFPai- | | AATGGCCCGCCTGGCATTATGCCCAGTACATGACCTTATGGGACTTTC | | | |
| LTR_v2 | | CTACTTGGCAGTACATCTACGTATTAGTCATCGCTATTACCATGGTGA | | | |
| | | TGCGGTTTTGGCAGTACATCAATGGGCGTGGATAGCGGTTTGACTCA | | | |
| | | CGGGGATTTCCAAGTCTCCACCCCATTGACGTCAATGGGAGTTTGTTT | | | |
| | | TGGCACCAAAATCAACGGGACTTTCCAAAATGTCGTAACAACTCCGCC | | | |
| | | CCATTGACGCAAATGGGCGGTAGGCGTGTACGGTGGGAGGTCTATA | | | |
| | | TAAGCAGAGCTCGTTTAGTGAACCGTCAGCTTTGATCAGAATGAATTT | | | |
| | | GTCTTGGCTCCGTTTCTTCTTTCGCCCCGTCTAGATTCCTCTCTTACAGC | | | |
| | | TCGAGTGGCCTTCTCAGTCGAACCGTTCACGTTGCGAGCTGCTGGCG | | | |
| | | GCCGCAACATTTTGGCGCCAGAACTGGGACCTGAAGAATGGCgaacaa | | | |
| | | acgacccaacacccgtgcgttttattctgtctttttattgccgatcccccggccgctttacttgt | | | |
| | | acagctcgtccatgccgagagtgatcccggcggcggtcacgaactccagcaggaccatgtg | | | |
| | | atcgcgcttctcgttggggtctttgctcagggcggactgggtgctcaggtaagtatcaaggtt | | | |
| | | acaagacaggtttaaggagaccaatagaaactgggcttgtcgagacagagaagactcttg | | | |
| | | cgtttctgataggcacctattggtcttactgacatccactttgcctttctctccacaggtagtgg | | | |
| | | ttgtcgggcagcagcacggggccgtcgccgatgggggtgttctgctggtagtggtcggcga | | | |
| | | gctgcacgctgccgtcctcgatgttgtggcggatcttgaagttcaccttgatgccgttcttctg | | | |
| | | cttgtcggccatgatatagacgttgtggctgttgtagttgtactccagcttgtgccccaggatg | | | |
| | | ttgccgtcctccttgaagtcgatgcccttcagctcgatgcggttcaccagggtgtcgccctcg | | | |
| | | aacttcacctcggcgcgggtcttgtagttgccgtcgtccttgaagaagatggtgcgctcctgg | | | |
| | | acgtagccttcgggcatggcggacttgaagaagtcgtgctgcttcatgtggtcggggtagcg | | | |
| | | gctgaagcactgcacgccgtaggtcagggtggtcacgagggtgggccagggcacgggcag | | | |
| | | cttgccggtggtgcagatgaacttcagggtcagcttgccgtaggtggcatcgccctcgccct | | | |
| | | cgccggacacgctgaacttgtggccgtttacgtcgccgtccagctcgaccaggatgggcacc | | | |
| | | accccggtgaacagctcctcgcccttgctcaccatggtggctttaccaacagtaccggaatg | | | |
| | | ccaagcttgggtcctgtgttctggcggcaaacccgttgcgaaaaagaacgttcacggcgact | | | |
| | | actgcacttatatacggttctcccccaccctcgggaaaaaggcggagccagtacacgacat | | | |
| | | cactttcccagtttaccccgcgccaccttctctaggcaccggatcaattgccgacccctcccc | | | |
| | | ccaacttctcggggactgtgggcgatgtgcgctctgcccTCAGGCCAGCTTTTTCTTT | | | |
| | | TTTTTTAATTTTGTTAATAAAAGGGAGGAGATGTAGTCTCCCCTCCCCC | | | |
| | | AGCCTGAAACCTGCTTGCTCAGGGGTGGAGCTTCCCGCTCATCGCTCT | | | |
| | | GCCACGCCCACTGCTGGAACCTGCGGAGCCACACACGTGCACCTTTCT | | | |
| | | ACTGGACCAGAGATTATTCGGCGGGAATCGGGTCCCCTCCCCCTTCCT | | | |
| | | TCATAACTAGTGTCCCAACAATAAAATTTGAGCTTTGATCAGAATGAA | | | |
| | | TTTGTCTTGGCTCCGTTTCTTCTTTCGCCCCGTCTAGATTCCTCTCTTAC | | | |
| | | AGCTCGAGTGGCCTTCTCAGTCGAACCGTTCACGTTGCGAGCTGCTG | | | |
| | | GCGGCCGCAACAGGGGATCCAGACATGATAAGATACATTGATGAGTT | | | |
| | | TGGACAAACCACAACTAGAATGCAGTGAAAAAAATGCTTTATTTGTG | | | |
| | | AAATTTGTGATGCTATTGCTTTATTTGTAACCATTATAAGCTGCAATAA | | | |
| | | ACAAGTTAACAACAACAATTGCATTCATTTTATGTTTCAGGTTCAGGG | | | |
| | | GGAGGTGTGGGAGGTTTTTTCGGATCCTCTAGAGTCGACCTGCAGGC | | | |
| | | ATGCAAGCTTGGCGTAATCATGGTCATAGCTGTTTCCTGTGTGAAATT | | | |
| | | GTTATCCGCTCACAATTCCACACAACATACGAGCCGGAAGCATAAAG | | | |
| | | TGTAAAGCCTGGGGTGCCTAATGAGTGAGCTAACTCACATTAATTGC | | | |
| | | GTTGCGCTCACTGCCCGCTTTCCAGTCGGGAAACCTGTCGTGCCAGCT | | | |
| | | GCATTAATGAATCGGCCAACGCGCGGGGAGAGGCGGTTTGCGTATT | | | |
| | | GGGCGCTCTTCCGCTTCCTCGCTCACTGACTCGCTGCGCTCGGTCGTT | | | |
| | | CGGCTGCGGCGAGCGGTATCAGCTCACTCAAAGGCGGTAATACGGTT | | | |
| | | ATCCACAGAATCAGGGGATAACGCAGGAAAGAACATGTGAGCAAAA | | | |
| | | GGCCAGCAAAAGGCCAGGAACCGTAAAAAGGCCGCGTTGCTGGCGT | | | |
| | | TTTTCCATAGGCTCCGCCCCCCTGACGAGCATCACAAAAATCGACGCT | | | |
| | | CAAGTCAGAGGTGGCGAAACCCGACAGGACTATAAAGATACCAGGC | | | |
| | | GTTTCCCCCTGGAAGCTCCCTCGTGCGCTCTCCTGTTCCGACCCTGCC | | | |
| | | GCTTACCGGATACCTGTCCGCCTTTCTCCCTTCGGGAAGCGTGGCGCT | | | |
| | | TTCTCATAGCTCACGCTGTAGGTATCTCAGTTCGGTGTAGGTCGTTCG | | | |
| | | CTCCAAGCTGGGCTGTGTGCACGAACCCCCCGTTCAGCCCGACCGCT | | | |
| | | GCGCCTTATCCGGTAACTATCGTCTTGAGTCCAACCCGGTAAGACACG | | | |
| | | ACTTATCGCCACTGGCAGCAGCCACTGGTAACAGGATTAGCAGAGCG | | | |
| | | AGGTATGTAGGCGGTGCTACAGAGTTCTTGAAGTGGTGGCCTAACTA | | | |
| | | CGGCTACACTAGAAGGACAGTATTTGGTATCTGCGCTCTGCTGAAGC | | | |
| | | CAGTTACCTTCGGAAAAAGAGTTGGTAGCTCTTGATCCGGCAAACAA | | | |
| | | ACCACCGCTGGTAGCGGTGGTTTTTTTGTTTGCAAGCAGCAGATTACG | | | |
| | | CGCAGAAAAAAAGGATCTCAAGAAGATCCTTTGATCTTTTCTACGGG | | | |
| | | GTCTGACGCTCAGTGGAACGAAAACTCACGTTAAGGGATTTTGGTCA | | | |
| | | TGAGATTATCAAAAAGGATCTTCACCTAGATCCTTTTAAATTAAAAAT | | | |
| | | GAAGTTTTAAATCAATCTAAAGTATATATGAGTAAACTTGGTCTGACA | | | |
| | | GTTACCAATGCTTAATCAGTGAGGCACCTATCTCAGCGATCTGTCTAT | | | |
| | | TTCGTTCATCCATAGTTGCCTGACTCCCCGTCGTGTAGATAACTACGA | | | |
| | | TACGGGAGGGCTTACCATCTGGCCCCAGTGCTGCAATGATACCGCGA | | | |
| | | GACCCACGCTCACCGGCTCCAGATTTATCAGCAATAAACCAGCCAGCC | | | |
| | | GGAAGGGCCGAGCGCAGAAGTGGTCCTGCAACTTTATCCGCCTCCAT | | | |
| | | CCAGTCTATTAATTGTTGCCGGGAAGCTAGAGTAAGTAGTTCGCCAG | | | |
| | | TTAATAGTTTGCGCAACGTTGTTGCCATTGCTACAGGCATCGTGGTGT | | | |
| | | CACGCTCGTCGTTTGGTATGGCTTCATTCAGCTCCGGTTCCCAACGAT | | | |
| | | CAAGGCGAGTTACATGATCCCCCATGTTGTGCAAAAAAGCGGTTAGC | | | |
| | | TCCTTCGGTCCTCCGATCGTTGTCAGAAGTAAGTTGGCCGCAGTGTTA | | | |
| | | TCACTCATGGTTATGGCAGCACTGCATAATTCTCTTACTGTCATGCCAT | | | |
| | | CCGTAAGATGCTTTTCTGTGACTGGTGAGTACTCAACCAAGTCATTCT | | | |
| | | GAGAATAGTGTATGCGGCGACCGAGTTGCTCTTGCCCGGCGTCAATA | | | |
| | | CGGGATAATACCGCGCCACATAGCAGAACTTTAAAAGTGCTCATCATT | | | |
| | | GGAAAACGTTCTTCGGGGCGAAAACTCTCAAGGATCTTACCGCTGTT | | | |
| | | GAGATCCAGTTCGATGTAACCCACTCGTGCACCCAACTGATCTTCAGC | | | |
| | | ATCTTTTACTTTCACCAGCGTTTCTGGGTGAGCAAAAACAGGAAGGCA | | | |
| | | AAATGCCGCAAAAAAGGGAATAAGGGCGACACGGAAATGTTGAATA | | | |
| | | CTCATACTCTTCCTTTTTCAATATTATTGAAGCATTTATCAGGGTTATT | | | |
| | | GTCTCATGAGCGGATACATATTTGAATGTATTTAGAAAAATAAACAAA | | | |
| | | TAGGGGTTCCGCGCACATTTCCCCGAAAAGTGCCACCTGACGTCTAA | | | |
| | | GAAACCATTATTATCATGACATTAACCTATAAAAATAGGCGTATCACG | | | |
| | | AGGCCCTTTCGTCTCGCGCGTTTCGGTGATGACGGTGAAAACCTCTG | | | |
| | | ACACATGCAGCTCCCGGAGACGGTCACAGCTTGTCTGTAAGCGGATG | | | |
| | | CCGGGAGCAGACAAGCCCGTCAGGGCGCGTCAGCGGGTGTTGGCGG | | | |
| | | GTGTCGGGGCTGGCTTAACTATGCGGCATCAGAGCAGATTGTACTGA | | | |
| | | GAGTGCACCATATGCGGTGTGAAATACCGCACAGATGCGTAAGGAG | | | |
| | | AAAATACCGCATCAGGCGCCATTCGCCATTCAGGCTGCGCAACTGTT | | | |
| | | GGGAAGGGCGATCGGTGCGGGCCTCTTCGCTATTACGCCAGCTGGC | | | |
| | | GAAAGGGGGATGTGCTGCAAGGCGATTAAGTTGGGTAACGCCAGGG | | | |
| | | TTTTCCCAGTCACGACGTTGTAAAACGACGGCCAGT | | | |
| TEMPLATE_ | PLV10064 | GAATTCGAGCTTGCATGCCTGCAGGTCGTTACATAACTTACGGTAAAT | 325 | N/A | |
| COMPACT_ | | GGCCCGCCTGGCTGACCGCCCAACGACCCCCGCCCATTGACGTCAAT | | | |
| pCMVR- | | AATGACGTATGTTCCCATAGTAACGCCAATAGGGACTTTCCATTGACG | | | |
| U5- | | TCAATGGGTGGAGTATTTACGGTAAACTGCCCACTTGGCAGTACATC | | | |
| MusD6_ | | AAGTGTATCATATGCCAAGTACGCCCCCTATTGACGTCAATGACGGTA | | | |
| EF1-GFPai- | | AATGGCCCGCCTGGCATTATGCCCAGTACATGACCTTATGGGACTTTC | | | |
| LTR_v3 | | CTACTTGGCAGTACATCTACGTATTAGTCATCGCTATTACCATGGTGA | | | |
| | | TGCGGTTTTGGCAGTACATCAATGGGCGTGGATAGCGGTTTGACTCA | | | |
| | | CGGGGATTTCCAAGTCTCCACCCCATTGACGTCAATGGGAGTTTGTTT | | | |
| | | TGGCACCAAAATCAACGGGACTTTCCAAAATGTCGTAACAACTCCGCC | | | |
| | | CCATTGACGCAAATGGGGGTAGGCGTGTACGGTGGGAGGTCTATA | | | |
| | | TAAGCAGAGCTGAGCTTTGATCAGAATGAATTTGTCTTGGCTCCGTTT | | | |
| | | CTTCTTTCGCCCCGTCTAGATTCCTCTCTTACAGCTCGAGTGGCCTTCT | | | |
| | | CAGTCGAACCGTTCACGTTGCGAGCTGCTGGCGGCCGCAACATTTTG | | | |
| | | GCGCCAGAACTGGGACCTGAAGAATGGCgaacaaacgacccaacacccgtg | | | |
| | | cgttttattctgtctttttattgccgatcccccggccgctttacttgtacagctcgtccatgccg | | | |
| | | agagtgatcccggcggcggtcacgaactccagcaggaccatgtgatcgcgcttctcgttgg | | | |
| | | ggtctttgctcagggcggactgggtgctcaggtaagtatcaaggttacaagacaggtttaag | | | |
| | | gagaccaatagaaactgggcttgtcgagacagagaagactcttgcgtttctgataggcacc | | | |
| | | tattggtcttactgacatccactttgcctttctctccacaggtagtggttgtcgggcagcagca | | | |
| | | cggggccgtcgccgatgggggtgttctgctggtagtggtcggcgagctgcacgctgccgtcc | | | |
| | | tcgatgttgtggcggatcttgaagttcaccttgatgccgttcttctgcttgtcggccatgatat | | | |
| | | agacgttgtggctgttgtagttgtactccagcttgtgccccaggatgttgccgtcctccttgaa | | | |
| | | gtcgatgcccttcagctcgatgcggttcaccagggtgtcgccctcgaacttcacctcggcgcg | | | |
| | | ggtcttgtagttgccgtcgtccttgaagaagatggtgcgctcctggacgtagccttcgggcat | | | |
| | | ggcggacttgaagaagtcgtgctgcttcatgtggtcggggtagcggctgaagcactgcacg | | | |
| | | ccgtaggtcagggtggtcacgagggtgggccagggcacgggcagcttgccggtggtgcag | | | |
| | | atgaacttcagggtcagcttgccgtaggtggcatcgccctcgccctcgccggacacgctgaa | | | |
| | | cttgtggccgtttacgtcgccgtccagctcgaccaggatgggcaccaccccggtgaacagct | | | |
| | | cctcgcccttgctcaccatggtggctttaccaacagtaccggaatgccaagcttgggtcctgt | | | |
| | | gttctggcggcaaacccgttgcgaaaaagaacgttcacggcgactactgcacttatatacg | | | |
| | | gttctcccccaccctcgggaaaaaggcggagccagtacacgacatcactttcccagtttacc | | | |
| | | ccgcgccaccttctctaggcaccggatcaattgccgacccctccccccaacttctcggggact | | | |
| | | gtgggcgatgtgcgctctgcccTCAGGCCAGCTTTTTCTTTTTTTTTAATTTTGT | | | |
| | | TAATAAAAGGGAGGAGATGTAGTCTCCCCTCCCCCAGCCTGAAACCT | | | |
| | | GCTTGCTCAGGGGTGGAGCTTCCCGCTCATCGCTCTGCCACGCCCACT | | | |
| | | GCTGGAACCTGCGGAGCCACACACGTGCACCTTTCTACTGGACCAGA | | | |
| | | GATTATTCGGCGGGAATCGGGTCCCCTCCCCCTTCCTTCATAACTAGT | | | |
| | | GTCCCAACAATAAAATTTGAGCTTTGATCAGAATGAATTTGTCTTGGC | | | |
| | | TCCGTTTCTTCTTTCGCCCCGTCTAGATTCCTCTCTTACAGCTCGAGTG | | | |
| | | GCCTTCTCAGTCGAACCGTTCACGTTGCGAGCTGCTGGCGGCCGCAA | | | |
| | | CAGGGGATCCAGACATGATAAGATACATTGATGAGTTTGGACAAACC | | | |
| | | ACAACTAGAATGCAGTGAAAAAAATGCTTTATTTGTGAAATTTGTGAT | | | |
| | | GCTATTGCTTTATTTGTAACCATTATAAGCTGCAATAAACAAGTTAAC | | | |
| | | AACAACAATTGCATTCATTTTATGTTTCAGGTTCAGGGGGAGGTGTG | | | |
| | | GGAGGTTTTTTCGGATCCTCTAGAGTCGACCTGCAGGCATGCAAGCT | | | |
| | | TGGCGTAATCATGGTCATAGCTGTTTCCTGTGTGAAATTGTTATCCGC | | | |
| | | TCACAATTCCACACAACATACGAGCCGGAAGCATAAAGTGTAAAGCC | | | |
| | | TGGGGTGCCTAATGAGTGAGCTAACTCACATTAATTGCGTTGCGCTCA | | | |
| | | CTGCCCGCTTTCCAGTCGGGAAACCTGTCGTGCCAGCTGCATTAATGA | | | |
| | | ATCGGCCAACGCGCGGGGAGAGGCGGTTTGCGTATTGGGCGCTCTT | | | |
| | | CCGCTTCCTCGCTCACTGACTCGCTGCGCTCGGTCGTTCGGCTGCGGC | | | |
| | | GAGCGGTATCAGCTCACTCAAAGGCGGTAATACGGTTATCCACAGAA | | | |
| | | TCAGGGGATAACGCAGGAAAGAACATGTGAGCAAAAGGCCAGCAAA | | | |
| | | AGGCCAGGAACCGTAAAAAGGCCGCGTTGCTGGCGTTTTTCCATAGG | | | |
| | | CTCCGCCCCCCTGACGAGCATCACAAAAATCGACGCTCAAGTCAGAG | | | |
| | | GTGGCGAAACCCGACAGGACTATAAAGATACCAGGCGTTTCCCCCTG | | | |
| | | GAAGCTCCCTCGTGCGCTCTCCTGTTCCGACCCTGCCGCTTACCGGAT | | | |
| | | ACCTGTCCGCCTTTCTCCCTTCGGGAAGCGTGGCGCTTTCTCATAGCT | | | |
| | | CACGCTGTAGGTATCTCAGTTCGGTGTAGGTCGTTCGCTCCAAGCTG | | | |
| | | GGCTGTGTGCACGAACCCCCCGTTCAGCCCGACCGCTGCGCCTTATCC | | | |
| | | GGTAACTATCGTCTTGAGTCCAACCCGGTAAGACACGACTTATCGCCA | | | |
| | | CTGGCAGCAGCCACTGGTAACAGGATTAGCAGAGCGAGGTATGTAG | | | |
| | | GCGGTGCTACAGAGTTCTTGAAGTGGTGGCCTAACTACGGCTACACT | | | |
| | | AGAAGGACAGTATTTGGTATCTGCGCTCTGCTGAAGCCAGTTACCTTC | | | |
| | | GGAAAAAGAGTTGGTAGCTCTTGATCCGGCAAACAAACCACCGCTGG | | | |
| | | TAGCGGTGGTTTTTTTGTTTGCAAGCAGCAGATTACGCGCAGAAAAA | | | |
| | | AAGGATCTCAAGAAGATCCTTTGATCTTTTCTACGGGGTCTGACGCTC | | | |
| | | AGTGGAACGAAAACTCACGTTAAGGGATTTTGGTCATGAGATTATCA | | | |
| | | AAAAGGATCTTCACCTAGATCCTTTTAAATTAAAAATGAAGTTTTAAA | | | |
| | | TCAATCTAAAGTATATATGAGTAAACTTGGTCTGACAGTTACCAATGC | | | |
| | | TTAATCAGTGAGGCACCTATCTCAGCGATCTGTCTATTTCGTTCATCCA | | | |
| | | TAGTTGCCTGACTCCCCGTCGTGTAGATAACTACGATACGGGAGGGC | | | |
| | | TTACCATCTGGCCCCAGTGCTGCAATGATACCGCGAGACCCACGCTCA | | | |
| | | CCGGCTCCAGATTTATCAGCAATAAACCAGCCAGCCGGAAGGGCCGA | | | |
| | | GCGCAGAAGTGGTCCTGCAACTTTATCCGCCTCCATCCAGTCTATTAA | | | |
| | | TTGTTGCCGGGAAGCTAGAGTAAGTAGTTCGCCAGTTAATAGTTTGC | | | |
| | | GCAACGTTGTTGCCATTGCTACAGGCATCGTGGTGTCACGCTCGTCGT | | | |
| | | TTGGTATGGCTTCATTCAGCTCCGGTTCCCAACGATCAAGGCGAGTTA | | | |
| | | CATGATCCCCCATGTTGTGCAAAAAAGCGGTTAGCTCCTTCGGTCCTC | | | |
| | | CGATCGTTGTCAGAAGTAAGTTGGCCGCAGTGTTATCACTCATGGTTA | | | |
| | | TGGCAGCACTGCATAATTCTCTTACTGTCATGCCATCCGTAAGATGCT | | | |
| | | TTTCTGTGACTGGTGAGTACTCAACCAAGTCATTCTGAGAATAGTGTA | | | |
| | | TGCGGCGACCGAGTTGCTCTTGCCCGGCGTCAATACGGGATAATACC | | | |
| | | GCGCCACATAGCAGAACTTTAAAAGTGCTCATCATTGGAAAACGTTCT | | | |
| | | TCGGGGCGAAAACTCTCAAGGATCTTACCGCTGTTGAGATCCAGTTC | | | |
| | | GATGTAACCCACTCGTGCACCCAACTGATCTTCAGCATCTTTTACTTTC | | | |
| | | ACCAGCGTTTCTGGGTGAGCAAAAACAGGAAGGCAAAATGCCGCAA | | | |
| | | AAAAGGGAATAAGGGCGACACGGAAATGTTGAATACTCATACTCTTC | | | |
| | | CTTTTTCAATATTATTGAAGCATTTATCAGGGTTATTGTCTCATGAGCG | | | |
| | | GATACATATTTGAATGTATTTAGAAAAATAAACAAATAGGGGTTCCG | | | |
| | | CGCACATTTCCCCGAAAAGTGCCACCTGACGTCTAAGAAACCATTATT | | | |
| | | ATCATGACATTAACCTATAAAAATAGGCGTATCACGAGGCCCTTTCGT | | | |
| | | CTCGCGCGTTTCGGTGATGACGGTGAAAACCTCTGACACATGCAGCT | | | |
| | | CCCGGAGACGGTCACAGCTTGTCTGTAAGCGGATGCCGGGAGCAGA | | | |
| | | CAAGCCCGTCAGGGCGCGTCAGCGGGTGTTGGCGGGTGTCGGGGCT | | | |
| | | GGCTTAACTATGCGGCATCAGAGCAGATTGTACTGAGAGTGCACCAT | | | |
| | | ATGCGGTGTGAAATACCGCACAGATGCGTAAGGAGAAAATACCGCA | | | |
| | | TCAGGCGCCATTCGCCATTCAGGCTGCGCAACTGTTGGGAAGGGCGA | | | |
| | | TCGGTGCGGGCCTCTTCGCTATTACGCCAGCTGGCGAAAGGGGGATG | | | |
| | | TGCTGCAAGGCGATTAAGTTGGGTAACGCCAGGGTTTTCCCAGTCAC | | | |
| | | GACGTTGTAAAACGACGGCCAGT | | | |
| TEMPLATE_ | PLV10072 | GAATTCGAGCTTGCATGCCTGCAGGTCGTTACATAACTTACGGTAAAT | 326 | N/A | |
| pCMV_ | | GGCCCGCCTGGCTGACCGCCCAACGACCCCCGCCCATTGACGTCAAT | | | |
| R-U5- | | AATGACGTATGTTCCCATAGTAACGCCAATAGGGACTTTCCATTGACG | | | |
| MusD6_ | | TCAATGGGTGGAGTATTTACGGTAAACTGCCCACTTGGCAGTACATC | | | |
| EF1-GFPai- | | AAGTGTATCATATGCCAAGTACGCCCCCTATTGACGTCAATGACGGTA | | | |
| LTR_v1 | | AATGGCCCGCCTGGCATTATGCCCAGTACATGACCTTATGGGACTTTC | | | |
| | | CTACTTGGCAGTACATCTACGTATTAGTCATCGCTATTACCATGGTGA | | | |
| | | TGCGGTTTTGGCAGTACATCAATGGGCGTGGATAGCGGTTTGACTCA | | | |
| | | CGGGGATTTCCAAGTCTCCACCCCATTGACGTCAATGGGAGTTTGTTT | | | |
| | | TGGCACCAAAATCAACGGGACTTTCCAAAATGTCGTAACAACTCCGCC | | | |
| | | CCATTGACGCAAATGGGCGGTAGGCGTGTACGGTGGGAGGTCTATA | | | |
| | | TAAGCAGAGCTCGTTTAGTGAACCGTCAGAGCTTTGATCAGAATGAA | | | |
| | | TTTGTCTTGGCTCCGTTTCTTCTTTCGCCCCGTCTAGATTCCTCTCTTAC | | | |
| | | AGCTCGAGTGGCCTTCTCAGTCGAACCGTTCACGTTGCGAGCTGCTG | | | |
| | | GCGGCCGCAACATTTTGGCGCCAGAACTGGGACCTGAAGAATGGCA | | | |
| | | GAGAGATGCTAAGAGGAACGCTGCTTTGGAGCTCCACAGGAAAGGA | | | |
| | | TCTTCGTATCGGACATCGGAGCAACGGACAGGTACACATGCTAGCGC | | | |
| | | TAGCTTAAAATTTCAGTTTTGTAAAGTGTTGCTGAGGATGTGGTAGG | | | |
| | | ATACGAATTAAGCTTGAATCAGTGCTAACCCAACGCTGGTTCTGCTTG | | | |
| | | GGTCAGCAGCGTGTTAATCGGAACTAGAAACGGAAACAGGCAGGTT | | | |
| | | AGCCGCAGCTTTTTAGGAAGCTGCTTAGGTGGAAGAAGAAAGGGTTT | | | |
| | | AAAGTCATGGATCAGGCGGTTGCCCATAGTTTTCAGGAGTTGTTTCA | | | |
| | | GGCCAGAGGAGTAAGGCTTGAAGTACAATTAGTAAAAAATTTTTTAG | | | |
| | | GTAAGATAGATAGCTGTTGCCCATGGTTCAAGGAAGAAGAAACACTA | | | |
| | | GATTGTGGAACCTGGGAGAAAGTTGGTGAGGCCTTAAAAATCACTCA | | | |
| | | GGCAGATAATTTTACCCTAGAATTTGGGGTAGAGGCTCAGTTTGTGTT | | | |
| | | TTTTCACGAGATGAAGATGGAGCACGGTGGCTGCCAGAGAGATTAAT | | | |
| | | TCGTCAGACGAACACAGATTCTGACTCTTCTGGTAAGTATCATTCTAA | | | |
| | | AGACTAAAATTCCTTTTGTGCTTAAAATTCAGCTGAGAGCAACAGCTC | | | |
| | | TCAAAGCTGTTCTCCAGCTACTCTCTGAGCCAGCTCCCGACAGGAGGC | | | |
| | | CGGAGACTAGCCTCAGCTTTACAATTTGCATTTgaacaaacgacccaacacc | | | |
| | | cgtgcgttttattctgtctttttattgccgatcccccggccgctttacttgtacagctcgtccatg | | | |
| | | ccgagagtgatcccggcggcggtcacgaactccagcaggaccatgtgatcgcgcttctcgtt | | | |
| | | ggggtctttgctcagggcggactgggtgctcaggtaagtatcaaggttacaagacaggttta | | | |
| | | aggagaccaatagaaactgggcttgtcgagacagagaagactcttgcgtttctgataggca | | | |
| | | cctattggtcttactgacatccactttgcctttctctccacaggtagtggttgtcgggcagcag | | | |
| | | cacggggccgtcgccgatgggggtgttctgctggtagtggtcggcgagctgcacgctgccgt | | | |
| | | cctcgatgttgtggcggatcttgaagttcaccttgatgccgttcttctgcttgtcggccatgat | | | |
| | | atagacgttgtggctgttgtagttgtactccagcttgtgccccaggatgttgccgtcctccttg | | | |
| | | aagtcgatgcccttcagctcgatgcggttcaccagggtgtcgccctcgaacttcacctcggc | | | |
| | | gcgggtcttgtagttgccgtcgtccttgaagaagatggtgcgctcctggacgtagccttcggg | | | |
| | | catggcggacttgaagaagtcgtgctgcttcatgtggtcggggtagcggctgaagcactgc | | | |
| | | acgccgtaggtcagggtggtcacgagggtgggccagggcacgggcagcttgccggtggtg | | | |
| | | cagatgaacttcagggtcagcttgccgtaggtggcatcgccctcgccctcgccggacacgct | | | |
| | | gaacttgtggccgtttacgtcgccgtccagctcgaccaggatgggcaccaccccggtgaac | | | |
| | | agctcctcgcccttgctcaccatggtggctttaccaacagtaccggaatgccaagcttgggtc | | | |
| | | ctgtgttctggcggcaaacccgttgcgaaaaagaacgttcacggcgactactgcacttatat | | | |
| | | acggttctcccccaccctcgggaaaaaggcggagccagtacacgacatcactttcccagttt | | | |
| | | accccgcgccaccttctctaggcaccggatcaattgccgacccctccccccaacttctcggg | | | |
| | | gactgtgggcgatgtgcgctctgcccAAATAAAGTACCTAGACTTCCCCGAAAA | | | |
| | | AAGTTCTGCTTTTCTACTTTCTCACTGTCTTTCAAGATTTTGTCTTTCAA | | | |
| | | GCAGGTAAATCAACATTCTCGAGGCGGACCAGCGGATGTGCATCCCC | | | |
| | | GCCCCCCTAGAGCACTCAGGTGGCAGCTGTTATCCCCAGTCTCAGGA | | | |
| | | CATTCCAGCATGTGGCCTTCAGTCTGAGTTAAAAATTAGGTTTACCCA | | | |
| | | GAGGACTAGAATAGTAGATATTTCTATATTAATAAAGATTGGTTTTTA | | | |
| | | TTTTGATAGACAGGCTTAGCCCCTTAGCTGACCTCTGGCTTTTCACCCT | | | |
| | | TGCTGTTACTGCAAGGTGTCTTTAGCTCAATAAGGCTGTGGAAAAAA | | | |
| | | ACAGGGATGAGGAGGAACGGCTCCCAGCTCCTATTTTAGCCACAAAT | | | |
| | | CGTGGTGTTACTAACGACATAATTCTTGCTTAGGCTTTGCTAAATCTG | | | |
| | | AGGTTGATAATTCTCCTTTAGGAGCTGCACAGCGCTCAGAACTGTGCA | | | |
| | | TACTGATTTGTGATGGTACAAATTCAGTATGGGCATCGCTTGGTGCA | | | |
| | | GATGGAGGTACTGCAAGGAAAGGTCCCAGCTTGACCATTTCTGAGTT | | | |
| | | TCCTGTGAGATAAACCCGGTTTGAAAGAGGTTGGTACCAAATTATAT | | | |
| | | ATCCCTCGGCTCTACCTCGCCTCCCCAAAAGGTACCAGAGCCACAGGT | | | |
| | | GTGGATTTTAACAGAATCCACGGGAGGAATCGGGTCCATGTCCACCC | | | |
| | | AAGCCAAGGTTAAAAGCCCACTCATCTACGGATGAGAAAATCATTTG | | | |
| | | ATCACCTCAGTTAAGCGCTGCCTTATTTTAACTTAATTAATAGGGGGG | | | |
| | | AGAGAGATTGGAGACTTACTATTGAAAGGGCAAGCCCTTCACTGCCT | | | |
| | | CCCACCCAAATAAAAAAGCCAATTGGCCTTGTACTACAGAGCTGGCC | | | |
| | | GGACCCCTTATCCCTGTTACCCACCAATCATCCAAAAATGCGGAGGAA | | | |
| | | TATCAACTTAGTGTTATTCTTATTATAGTGTATTTCACACTTGTTCAGTC | | | |
| | | AAACTTAGCCAGAGTTCCAACGCCCTACTTAAAATTCAACTAGAAAGT | | | |
| | | TACCTACCAAGTACTAATTAGCATTATAAAGTCAGAGCCTACAGCTCC | | | |
| | | AGGCTTTTCAGTTAGTTGTTTACTAAGATAAGAAAAGACAGTCTTAGC | | | |
| | | CAGATACAGTTTACCATAATAAAAGTTAAAGAATCCCAGGGAAGCAA | | | |
| | | GTTTTTTCTTTTAGCCCTAGATTCCAGGCAGAACTATTGAGCATAGAT | | | |
| | | AATTTTTCCCCCTCAGGCCAGCTTTTTCTTTTTTTTTAATTTTGTTAATA | | | |
| | | AAAGGGAGGAGATGTAGTCTCCCCTCCCCCAGCCTGAAACCTGCTTG | | | |
| | | CTCAGGGGTGGAGCTTCCCGCTCATCGCTCTGCCACGCCCACTGCTG | | | |
| | | GAACCTGCGGAGCCACACACGTGCACCTTTCTACTGGACCAGAGATT | | | |
| | | ATTCGGCGGGAATCGGGTCCCCTCCCCCTTCCTTCATAACTAGTGTCC | | | |
| | | CAACAATAAAATTTGAGCTTTGATCAGAATGAATTTGTCTTGGCTCCG | | | |
| | | TTTCTTCTTTCGCCCCGTCTAGATTCCTCTCTTACAGCTCGAGTGGCCT | | | |
| | | TCTCAGTCGAACCGTTCACGTTGCGAGCTGCTGGCGGCCGCAACAGG | | | |
| | | GGATCCAGACATGATAAGATACATTGATGAGTTTGGACAAACCACAA | | | |
| | | CTAGAATGCAGTGAAAAAAATGCTTTATTTGTGAAATTTGTGATGCTA | | | |
| | | TTGCTTTATTTGTAACCATTATAAGCTGCAATAAACAAGTTAACAACA | | | |
| | | ACAATTGCATTCATTTTATGTTTCAGGTTCAGGGGGAGGTGTGGGAG | | | |
| | | GTTTTTTCGGATCCTCTAGAGTCGACCTGCAGGCATGCAAGCTTGGCG | | | |
| | | TAATCATGGTCATAGCTGTTTCCTGTGTGAAATTGTTATCCGCTCACAA | | | |
| | | TTCCACACAACATACGAGCCGGAAGCATAAAGTGTAAAGCCTGGGGT | | | |
| | | GCCTAATGAGTGAGCTAACTCACATTAATTGCGTTGCGCTCACTGCCC | | | |
| | | GCTTTCCAGTCGGGAAACCTGTCGTGCCAGCTGCATTAATGAATCGG | | | |
| | | CCAACGCGCGGGGAGAGGCGGTTTGCGTATTGGGCGCTCTTCCGCTT | | | |
| | | CCTCGCTCACTGACTCGCTGCGCTCGGTCGTTCGGCTGCGGCGAGCG | | | |
| | | GTATCAGCTCACTCAAAGGCGGTAATACGGTTATCCACAGAATCAGG | | | |
| | | GGATAACGCAGGAAAGAACATGTGAGCAAAAGGCCAGCAAAAGGCC | | | |
| | | AGGAACCGTAAAAAGGCCGCGTTGCTGGCGTTTTTCCATAGGCTCCG | | | |
| | | CCCCCCTGACGAGCATCACAAAAATCGACGCTCAAGTCAGAGGTGGC | | | |
| | | GAAACCCGACAGGACTATAAAGATACCAGGCGTTTCCCCCTGGAAGC | | | |
| | | TCCCTCGTGCGCTCTCCTGTTCCGACCCTGCCGCTTACCGGATACCTGT | | | |
| | | CCGCCTTTCTCCCTTCGGGAAGCGTGGCGCTTTCTCATAGCTCACGCT | | | |
| | | GTAGGTATCTCAGTTCGGTGTAGGTCGTTCGCTCCAAGCTGGGCTGT | | | |
| | | GTGCACGAACCCCCCGTTCAGCCCGACCGCTGCGCCTTATCCGGTAAC | | | |
| | | TATCGTCTTGAGTCCAACCCGGTAAGACACGACTTATCGCCACTGGCA | | | |
| | | GCAGCCACTGGTAACAGGATTAGCAGAGCGAGGTATGTAGGCGGTG | | | |
| | | CTACAGAGTTCTTGAAGTGGTGGCCTAACTACGGCTACACTAGAAGG | | | |
| | | ACAGTATTTGGTATCTGCGCTCTGCTGAAGCCAGTTACCTTCGGAAAA | | | |
| | | AGAGTTGGTAGCTCTTGATCCGGCAAACAAACCACCGCTGGTAGCGG | | | |
| | | TGGTTTTTTTGTTTGCAAGCAGCAGATTACGCGCAGAAAAAAAGGAT | | | |
| | | CTCAAGAAGATCCTTTGATCTTTTCTACGGGGTCTGACGCTCAGTGGA | | | |
| | | ACGAAAACTCACGTTAAGGGATTTTGGTCATGAGATTATCAAAAAGG | | | |
| | | ATCTTCACCTAGATCCTTTTAAATTAAAAATGAAGTTTTAAATCAATCT | | | |
| | | AAAGTATATATGAGTAAACTTGGTCTGACAGTTACCAATGCTTAATCA | | | |
| | | GTGAGGCACCTATCTCAGCGATCTGTCTATTTCGTTCATCCATAGTTG | | | |
| | | CCTGACTCCCCGTCGTGTAGATAACTACGATACGGGAGGGCTTACCA | | | |
| | | TCTGGCCCCAGTGCTGCAATGATACCGCGAGACCCACGCTCACCGGC | | | |
| | | TCCAGATTTATCAGCAATAAACCAGCCAGCCGGAAGGGCCGAGCGCA | | | |
| | | GAAGTGGTCCTGCAACTTTATCCGCCTCCATCCAGTCTATTAATTGTTG | | | |
| | | CCGGGAAGCTAGAGTAAGTAGTTCGCCAGTTAATAGTTTGCGCAACG | | | |
| | | TTGTTGCCATTGCTACAGGCATCGTGGTGTCACGCTCGTCGTTTGGTA | | | |
| | | TGGCTTCATTCAGCTCCGGTTCCCAACGATCAAGGCGAGTTACATGAT | | | |
| | | CCCCCATGTTGTGCAAAAAAGCGGTTAGCTCCTTCGGTCCTCCGATCG | | | |
| | | TTGTCAGAAGTAAGTTGGCCGCAGTGTTATCACTCATGGTTATGGCA | | | |
| | | GCACTGCATAATTCTCTTACTGTCATGCCATCCGTAAGATGCTTTTCTG | | | |
| | | TGACTGGTGAGTACTCAACCAAGTCATTCTGAGAATAGTGTATGCGG | | | |
| | | CGACCGAGTTGCTCTTGCCCGGCGTCAATACGGGATAATACCGCGCC | | | |
| | | ACATAGCAGAACTTTAAAAGTGCTCATCATTGGAAAACGTTCTTCGGG | | | |
| | | GCGAAAACTCTCAAGGATCTTACCGCTGTTGAGATCCAGTTCGATGTA | | | |
| | | ACCCACTCGTGCACCCAACTGATCTTCAGCATCTTTTACTTTCACCAGC | | | |
| | | GTTTCTGGGTGAGCAAAAACAGGAAGGCAAAATGCCGCAAAAAAGG | | | |
| | | GAATAAGGGCGACACGGAAATGTTGAATACTCATACTCTTCCTTTTTC | | | |
| | | AATATTATTGAAGCATTTATCAGGGTTATTGTCTCATGAGCGGATACA | | | |
| | | TATTTGAATGTATTTAGAAAAATAAACAAATAGGGGTTCCGCGCACAT | | | |
| | | TTCCCCGAAAAGTGCCACCTGACGTCTAAGAAACCATTATTATCATGA | | | |
| | | CATTAACCTATAAAAATAGGCGTATCACGAGGCCCTTTCGTCTCGCGC | | | |
| | | GTTTCGGTGATGACGGTGAAAACCTCTGACACATGCAGCTCCCGGAG | | | |
| | | ACGGTCACAGCTTGTCTGTAAGCGGATGCCGGGAGCAGACAAGCCC | | | |
| | | GTCAGGGCGCGTCAGCGGGTGTTGGCGGGTGTCGGGGCTGGCTTAA | | | |
| | | CTATGCGGCATCAGAGCAGATTGTACTGAGAGTGCACCATATGCGGT | | | |
| | | GTGAAATACCGCACAGATGCGTAAGGAGAAAATACCGCATCAGGCG | | | |
| | | CCATTCGCCATTCAGGCTGCGCAACTGTTGGGAAGGGCGATCGGTGC | | | |
| | | GGGCCTCTTCGCTATTACGCCAGCTGGCGAAAGGGGGATGTGCTGCA | | | |
| | | AGGCGATTAAGTTGGGTAACGCCAGGGTTTTCCCAGTCACGACGTTG | | | |
| | | TAAAACGACGGCCAGT | | | |
| TEMPLATE_ | PLV10073 | GAATTCGAGCTTGCATGCCTGCAGGTCGTTACATAACTTACGGTAAAT | 327 | N/A | |
| pCMV_ | | GGCCCGCCTGGCTGACCGCCCAACGACCCCCGCCCATTGACGTCAAT | | | |
| R-U5- | | AATGACGTATGTTCCCATAGTAACGCCAATAGGGACTTTCCATTGACG | | | |
| MusD6_ | | TCAATGGGTGGAGTATTTACGGTAAACTGCCCACTTGGCAGTACATC | | | |
| EF1-GFPai- | | AAGTGTATCATATGCCAAGTACGCCCCCTATTGACGTCAATGACGGTA | | | |
| LTR_v2 | | AATGGCCCGCCTGGCATTATGCCCAGTACATGACCTTATGGGACTTTC | | | |
| | | CTACTTGGCAGTACATCTACGTATTAGTCATCGCTATTACCATGGTGA | | | |
| | | TGCGGTTTTGGCAGTACATCAATGGGCGTGGATAGCGGTTTGACTCA | | | |
| | | CGGGGATTTCCAAGTCTCCACCCCATTGACGTCAATGGGAGTTTGTTT | | | |
| | | TGGCACCAAAATCAACGGGACTTTCCAAAATGTCGTAACAACTCCGCC | | | |
| | | CCATTGACGCAAATGGGCGGTAGGCGTGTACGGTGGGAGGTCTATA | | | |
| | | TAAGCAGAGCTCGTTTAGTGAACCGTCAGCTTTGATCAGAATGAATTT | | | |
| | | GTCTTGGCTCCGTTTCTTCTTTCGCCCCGTCTAGATTCCTCTCTTACAGC | | | |
| | | TCGAGTGGCCTTCTCAGTCGAACCGTTCACGTTGCGAGCTGCTGGCG | | | |
| | | GCCGCAACATTTTGGCGCCAGAACTGGGACCTGAAGAATGGCAGAG | | | |
| | | AGATGCTAAGAGGAACGCTGCTTTGGAGCTCCACAGGAAAGGATCTT | | | |
| | | CGTATCGGACATCGGAGCAACGGACAGGTACACATGCTAGCGCTAGC | | | |
| | | TTAAAATTTCAGTTTTGTAAAGTGTTGCTGAGGATGTGGTAGGATAC | | | |
| | | GAATTAAGCTTGAATCAGTGCTAACCCAACGCTGGTTCTGCTTGGGTC | | | |
| | | AGCAGCGTGTTAATCGGAACTAGAAACGGAAACAGGCAGGTTAGCC | | | |
| | | GCAGCTTTTTAGGAAGCTGCTTAGGTGGAAGAAGAAAGGGTTTAAA | | | |
| | | GTCATGGATCAGGCGGTTGCCCATAGTTTTCAGGAGTTGTTTCAGGC | | | |
| | | CAGAGGAGTAAGGCTTGAAGTACAATTAGTAAAAAATTTTTTAGGTA | | | |
| | | AGATAGATAGCTGTTGCCCATGGTTCAAGGAAGAAGAAACACTAGAT | | | |
| | | TGTGGAACCTGGGAGAAAGTTGGTGAGGCCTTAAAAATCACTCAGGC | | | |
| | | AGATAATTTTACCCTAGAATTTGGGGTAGAGGCTCAGTTTGTGTTTTT | | | |
| | | TCACGAGATGAAGATGGAGCACGGTGGCTGCCAGAGAGATTAATTC | | | |
| | | GTCAGACGAACACAGATTCTGACTCTTCTGGTAAGTATCATTCTAAAG | | | |
| | | ACTAAAATTCCTTTTGTGCTTAAAATTCAGCTGAGAGCAACAGCTCTC | | | |
| | | AAAGCTGTTCTCCAGCTACTCTCTGAGCCAGCTCCCGACAGGAGGCC | | | |
| | | GGAGACTAGCCTCAGCTTTACAATTTGCATTTgaacaaacgacccaacaccc | | | |
| | | gtgcgttttattctgtctttttattgccgatcccccggccgctttacttgtacagctcgtccatgc | | | |
| | | cgagagtgatcccggcggcggtcacgaactccagcaggaccatgtgatcgcgcttctcgtt | | | |
| | | ggggtctttgctcagggcggactgggtgctcaggtaagtatcaaggttacaagacaggttta | | | |
| | | aggagaccaatagaaactgggcttgtcgagacagagaagactcttgcgtttctgataggca | | | |
| | | cctattggtcttactgacatccactttgcctttctctccacaggtagtggttgtcgggcagcag | | | |
| | | cacggggccgtcgccgatgggggtgttctgctggtagtggtcggcgagctgcacgctgccgt | | | |
| | | cctcgatgttgtggcggatcttgaagttcaccttgatgccgttcttctgcttgtcggccatgat | | | |
| | | atagacgttgtggctgttgtagttgtactccagcttgtgccccaggatgttgccgtcctccttg | | | |
| | | aagtcgatgcccttcagctcgatgcggttcaccagggtgtcgccctcgaacttcacctcggc | | | |
| | | gcgggtcttgtagttgccgtcgtccttgaagaagatggtgcgctcctggacgtagccttcggg | | | |
| | | catggcggacttgaagaagtcgtgctgcttcatgtggtcggggtagcggctgaagcactgc | | | |
| | | acgccgtaggtcagggtggtcacgagggtgggccagggcacgggcagcttgccggtggtg | | | |
| | | cagatgaacttcagggtcagcttgccgtaggtggcatcgccctcgccctcgccggacacgct | | | |
| | | gaacttgtggccgtttacgtcgccgtccagctcgaccaggatgggcaccaccccggtgaac | | | |
| | | agctcctcgcccttgctcaccatggtggctttaccaacagtaccggaatgccaagcttgggtc | | | |
| | | ctgtgttctggcggcaaacccgttgcgaaaaagaacgttcacggcgactactgcacttatat | | | |
| | | acggttctcccccaccctcgggaaaaaggcggagccagtacacgacatcactttcccagttt | | | |
| | | accccgcgccaccttctctaggcaccggatcaattgccgacccctccccccaacttctcggg | | | |
| | | gactgtgggcgatgtgcgctctgcccAAATAAAGTACCTAGACTTCCCCGAAAA | | | |
| | | AAGTTCTGCTTTTCTACTTTCTCACTGTCTTTCAAGATTTTGTCTTTCAA | | | |
| | | GCAGGTAAATCAACATTCTCGAGGCGGACCAGCGGATGTGCATCCCC | | | |
| | | GCCCCCCTAGAGCACTCAGGTGGCAGCTGTTATCCCCAGTCTCAGGA | | | |
| | | CATTCCAGCATGTGGCCTTCAGTCTGAGTTAAAAATTAGGTTTACCCA | | | |
| | | GAGGACTAGAATAGTAGATATTTCTATATTAATAAAGATTGGTTTTTA | | | |
| | | TTTTGATAGACAGGCTTAGCCCCTTAGCTGACCTCTGGCTTTTCACCCT | | | |
| | | TGCTGTTACTGCAAGGTGTCTTTAGCTCAATAAGGCTGTGGAAAAAA | | | |
| | | ACAGGGATGAGGAGGAACGGCTCCCAGCTCCTATTTTAGCCACAAAT | | | |
| | | CGTGGTGTTACTAACGACATAATTCTTGCTTAGGCTTTGCTAAATCTG | | | |
| | | AGGTTGATAATTCTCCTTTAGGAGCTGCACAGCGCTCAGAACTGTGCA | | | |
| | | TACTGATTTGTGATGGTACAAATTCAGTATGGGCATCGCTTGGTGCA | | | |
| | | GATGGAGGTACTGCAAGGAAAGGTCCCAGCTTGACCATTTCTGAGTT | | | |
| | | TCCTGTGAGATAAACCCGGTTTGAAAGAGGTTGGTACCAAATTATAT | | | |
| | | ATCCCTCGGCTCTACCTCGCCTCCCCAAAAGGTACCAGAGCCACAGGT | | | |
| | | GTGGATTTTAACAGAATCCACGGGAGGAATCGGGTCCATGTCCACCC | | | |
| | | AAGCCAAGGTTAAAAGCCCACTCATCTACGGATGAGAAAATCATTTG | | | |
| | | ATCACCTCAGTTAAGCGCTGCCTTATTTTAACTTAATTAATAGGGGGG | | | |
| | | AGAGAGATTGGAGACTTACTATTGAAAGGGCAAGCCCTTCACTGCCT | | | |
| | | CCCACCCAAATAAAAAAGCCAATTGGCCTTGTACTACAGAGCTGGCC | | | |
| | | GGACCCCTTATCCCTGTTACCCACCAATCATCCAAAAATGCGGAGGAA | | | |
| | | TATCAACTTAGTGTTATTCTTATTATAGTGTATTTCACACTTGTTCAGTC | | | |
| | | AAACTTAGCCAGAGTTCCAACGCCCTACTTAAAATTCAACTAGAAAGT | | | |
| | | TACCTACCAAGTACTAATTAGCATTATAAAGTCAGAGCCTACAGCTCC | | | |
| | | AGGCTTTTCAGTTAGTTGTTTACTAAGATAAGAAAAGACAGTCTTAGC | | | |
| | | CAGATACAGTTTACCATAATAAAAGTTAAAGAATCCCAGGGAAGCAA | | | |
| | | GTTTTTTCTTTTAGCCCTAGATTCCAGGCAGAACTATTGAGCATAGAT | | | |
| | | AATTTTTCCCCCTCAGGCCAGCTTTTTCTTTTTTTTTAATTTTGTTAATA | | | |
| | | AAAGGGAGGAGATGTAGTCTCCCCTCCCCCAGCCTGAAACCTGCTTG | | | |
| | | CTCAGGGGTGGAGCTTCCCGCTCATCGCTCTGCCACGCCCACTGCTG | | | |
| | | GAACCTGCGGAGCCACACACGTGCACCTTTCTACTGGACCAGAGATT | | | |
| | | ATTCGGCGGGAATCGGGTCCCCTCCCCCTTCCTTCATAACTAGTGTCC | | | |
| | | CAACAATAAAATTTGAGCTTTGATCAGAATGAATTTGTCTTGGCTCCG | | | |
| | | TTTCTTCTTTCGCCCCGTCTAGATTCCTCTCTTACAGCTCGAGTGGCCT | | | |
| | | TCTCAGTCGAACCGTTCACGTTGCGAGCTGCTGGCGGCCGCAACAGG | | | |
| | | GGATCCAGACATGATAAGATACATTGATGAGTTTGGACAAACCACAA | | | |
| | | CTAGAATGCAGTGAAAAAAATGCTTTATTTGTGAAATTTGTGATGCTA | | | |
| | | TTGCTTTATTTGTAACCATTATAAGCTGCAATAAACAAGTTAACAACA | | | |
| | | ACAATTGCATTCATTTTATGTTTCAGGTTCAGGGGGAGGTGTGGGAG | | | |
| | | GTTTTTTCGGATCCTCTAGAGTCGACCTGCAGGCATGCAAGCTTGGCG | | | |
| | | TAATCATGGTCATAGCTGTTTCCTGTGTGAAATTGTTATCCGCTCACAA | | | |
| | | TTCCACACAACATACGAGCCGGAAGCATAAAGTGTAAAGCCTGGGGT | | | |
| | | GCCTAATGAGTGAGCTAACTCACATTAATTGCGTTGCGCTCACTGCCC | | | |
| | | GCTTTCCAGTCGGGAAACCTGTCGTGCCAGCTGCATTAATGAATCGG | | | |
| | | CCAACGCGCGGGGAGAGGCGGTTTGCGTATTGGGCGCTCTTCCGCTT | | | |
| | | CCTCGCTCACTGACTCGCTGCGCTCGGTCGTTCGGCTGCGGCGAGCG | | | |
| | | GTATCAGCTCACTCAAAGGCGGTAATACGGTTATCCACAGAATCAGG | | | |
| | | GGATAACGCAGGAAAGAACATGTGAGCAAAAGGCCAGCAAAAGGCC | | | |
| | | AGGAACCGTAAAAAGGCCGCGTTGCTGGCGTTTTTCCATAGGCTCCG | | | |
| | | CCCCCCTGACGAGCATCACAAAAATCGACGCTCAAGTCAGAGGTGGC | | | |
| | | GAAACCCGACAGGACTATAAAGATACCAGGCGTTTCCCCCTGGAAGC | | | |
| | | TCCCTCGTGCGCTCTCCTGTTCCGACCCTGCCGCTTACCGGATACCTGT | | | |
| | | CCGCCTTTCTCCCTTCGGGAAGCGTGGCGCTTTCTCATAGCTCACGCT | | | |
| | | GTAGGTATCTCAGTTCGGTGTAGGTCGTTCGCTCCAAGCTGGGCTGT | | | |
| | | GTGCACGAACCCCCCGTTCAGCCCGACCGCTGCGCCTTATCCGGTAAC | | | |
| | | TATCGTCTTGAGTCCAACCCGGTAAGACACGACTTATCGCCACTGGCA | | | |
| | | GCAGCCACTGGTAACAGGATTAGCAGAGCGAGGTATGTAGGCGGTG | | | |
| | | CTACAGAGTTCTTGAAGTGGTGGCCTAACTACGGCTACACTAGAAGG | | | |
| | | ACAGTATTTGGTATCTGCGCTCTGCTGAAGCCAGTTACCTTCGGAAAA | | | |
| | | AGAGTTGGTAGCTCTTGATCCGGCAAACAAACCACCGCTGGTAGCGG | | | |
| | | TGGTTTTTTTGTTTGCAAGCAGCAGATTACGCGCAGAAAAAAAGGAT | | | |
| | | CTCAAGAAGATCCTTTGATCTTTTCTACGGGGTCTGACGCTCAGTGGA | | | |
| | | ACGAAAACTCACGTTAAGGGATTTTGGTCATGAGATTATCAAAAAGG | | | |
| | | ATCTTCACCTAGATCCTTTTAAATTAAAAATGAAGTTTTAAATCAATCT | | | |
| | | AAAGTATATATGAGTAAACTTGGTCTGACAGTTACCAATGCTTAATCA | | | |
| | | GTGAGGCACCTATCTCAGCGATCTGTCTATTTCGTTCATCCATAGTTG | | | |
| | | CCTGACTCCCCGTCGTGTAGATAACTACGATACGGGAGGGCTTACCA | | | |
| | | TCTGGCCCCAGTGCTGCAATGATACCGCGAGACCCACGCTCACCGGC | | | |
| | | TCCAGATTTATCAGCAATAAACCAGCCAGCCGGAAGGGCCGAGCGCA | | | |
| | | GAAGTGGTCCTGCAACTTTATCCGCCTCCATCCAGTCTATTAATTGTTG | | | |
| | | CCGGGAAGCTAGAGTAAGTAGTTCGCCAGTTAATAGTTTGCGCAACG | | | |
| | | TTGTTGCCATTGCTACAGGCATCGTGGTGTCACGCTCGTCGTTTGGTA | | | |
| | | TGGCTTCATTCAGCTCCGGTTCCCAACGATCAAGGCGAGTTACATGAT | | | |
| | | CCCCCATGTTGTGCAAAAAAGCGGTTAGCTCCTTCGGTCCTCCGATCG | | | |

| | | | | |
|---|---|---|---|---|
| | | TTGTCAGAAGTAAGTTGGCCGCAGTGTTATCACTCATGGTTATGGCA | | |
| | | GCACTGCATAATTCTCTTACTGTCATGCCATCCGTAAGATGCTTTTCTG | | |
| | | TGACTGGTGAGTACTCAACCAAGTCATTCTGAGAATAGTGTATGCGG | | |
| | | CGACCGAGTTGCTCTTGCCCGGCGTCAATACGGGATAATACCGCGCC | | |
| | | ACATAGCAGAACTTTAAAAGTGCTCATCATTGGAAAACGTTCTTCGGG | | |
| | | GCGAAAACTCTCAAGGATCTTACCGCTGTTGAGATCCAGTTCGATGTA | | |
| | | ACCCACTCGTGCACCCAACTGATCTTCAGCATCTTTTACTTTCACCAGC | | |
| | | GTTTCTGGGTGAGCAAAAACAGGAAGGCAAAATGCCGCAAAAAAGG | | |
| | | GAATAAGGGCGACACGGAAATGTTGAATACTCATACTCTTCCTTTTTC | | |
| | | AATATTATTGAAGCATTTATCAGGGTTATTGTCTCATGAGCGGATACA | | |
| | | TATTTGAATGTATTTAGAAAAATAAACAAATAGGGGTTCCGCGCACAT | | |
| | | TTCCCCGAAAAGTGCCACCTGACGTCTAAGAAACCATTATTATCATGA | | |
| | | CATTAACCTATAAAAATAGGCGTATCACGAGGCCCTTTCGTCTCGCGC | | |
| | | GTTTCGGTGATGACGGTGAAAACCTCTGACACATGCAGCTCCCGGAG | | |
| | | ACGGTCACAGCTTGTCTGTAAGCGGATGCCGGGAGCAGACAAGCCC | | |
| | | GTCAGGGCGCGTCAGCGGGTGTTGGCGGGTGTCGGGGCTGGCTTAA | | |
| | | CTATGCGGCATCAGAGCAGATTGTACTGAGAGTGCACCATATGCGGT | | |
| | | GTGAAATACCGCACAGATGCGTAAGGAGAAAATACCGCATCAGGCG | | |
| | | CCATTCGCCATTCAGGCTGCGCAACTGTTGGGAAGGGCGATCGGTGC | | |
| | | GGGCCTCTTCGCTATTACGCCAGCTGGCGAAAGGGGGATGTGCTGCA | | |
| | | AGGCGATTAAGTTGGGTAACGCCAGGGTTTTCCCAGTCACGACGTTG | | |
| | | TAAAACGACGGCCAGT | | |
| TEMPLATE_ | PLV10074 | GAATTCGAGCTTGCATGCCTGCAGGTCGTTACATAACTTACGGTAAAT | 328 | N/A |
| pCMV_ | | GGCCCGCCTGGCTGACCGCCCAACGACCCCCGCCCATTGACGTCAAT | | |
| R-U5- | | AATGACGTATGTTCCCATAGTAACGCCAATAGGGACTTTCCATTGACG | | |
| MusD6_ | | TCAATGGGTGGAGTATTTACGGTAAACTGCCCACTTGGCAGTACATC | | |
| EF1-GFPai- | | AAGTGTATCATATGCCAAGTACGCCCCCTATTGACGTCAATGACGGTA | | |
| LTR_v3 | | AATGGCCCGCCTGGCATTATGCCCAGTACATGACCTTATGGGACTTTC | | |
| | | CTACTTGGCAGTACATCTACGTATTAGTCATCGCTATTACCATGGTGA | | |
| | | TGCGGTTTTGGCAGTACATCAATGGGCGTGGATAGCGGTTTGACTCA | | |
| | | CGGGGATTTCCAAGTCTCCACCCCATTGACGTCAATGGGAGTTTGTTT | | |
| | | TGGCACCAAAATCAACGGGACTTTCCAAAATGTCGTAACAACTCCGCC | | |
| | | CCATTGACGCAAATGGGCGGTAGGCGTGTACGGTGGGAGGTCTATA | | |
| | | TAAGCAGAGCTGAGCTTTGATCAGAATGAATTTGTCTTGGCTCCGTTT | | |
| | | CTTCTTTCGCCCCGTCTAGATTCCTCTCTTACAGCTCGAGTGGCCTTCT | | |
| | | CAGTCGAACCGTTCACGTTGCGAGCTGCTGGCGGCCGCAACATTTTG | | |
| | | GCGCCAGAACTGGGACCTGAAGAATGGCAGAGAGATGCTAAGAGGA | | |
| | | ACGCTGCTTTGGAGCTCCACAGGAAAGGATCTTCGTATCGGACATCG | | |
| | | GAGCAACGGACAGGTACACATGCTAGCGCTAGCTTAAAATTTCAGTT | | |
| | | TTGTAAAGTGTTGCTGAGGATGTGGTAGGATACGAATTAAGCTTGAA | | |
| | | TCAGTGCTAACCCAACGCTGGTTCTGCTTGGGTCAGCAGCGTGTTAAT | | |
| | | CGGAACTAGAAACGGAAACAGGCAGGTTAGCCGCAGCTTTTTAGGA | | |
| | | AGCTGCTTAGGTGGAAGAAGAAAGGGTTTAAAGTCATGGATCAGGC | | |
| | | GGTTGCCCATAGTTTTCAGGAGTTGTTTCAGGCCAGAGGAGTAAGGC | | |
| | | TTGAAGTACAATTAGTAAAAAATTTTTTAGGTAAGATAGATAGCTGTT | | |
| | | GCCCATGGTTCAAGGAAGAAGAAACACTAGATTGTGGAACCTGGGA | | |
| | | GAAAGTTGGTGAGGCCTTAAAAATCACTCAGGCAGATAATTTTACCCT | | |
| | | AGAATTTGGGGTAGAGGCTCAGTTTGTGTTTTTTCACGAGATGAAGA | | |
| | | TGGAGCACGGTGGCTGCCAGAGAGATTAATTCGTCAGACGAACACA | | |
| | | GATTCTGACTCTTCTGGTAAGTATCATTCTAAAGACTAAAATTCCTTTT | | |
| | | GTGCTTAAAATTCAGCTGAGAGCAACAGCTCTCAAAGCTGTTCTCCAG | | |
| | | CTACTCTCTGAGCCAGCTCCCGACAGGAGGCCGGAGACTAGCCTCAG | | |
| | | CTTTACAATTTGCATTTgaacaaacgacccaacacccgtgcgttttattctgtcttttt | | |
| | | attgccgatcccccggccgctttacttgtacagctcgtccatgccgagagtgatcccggcgg | | |
| | | cggtcacgaactccagcaggaccatgtgatcgcgcttctcgttggggtctttgctcagggcg | | |
| | | gactgggtgctcaggtaagtatcaaggttacaagacaggtttaaggagaccaatagaaact | | |
| | | gggcttgtcgagacagagaagactcttgcgtttctgataggcacctattggtcttactgacat | | |
| | | ccactttgcctttctctccacaggtagtggttgtcgggcagcagcacggggccgtcgccgat | | |
| | | gggggtgttctgctggtagtggtcggcgagctgcacgctgccgtcctcgatgttgtggcggat | | |
| | | cttgaagttcaccttgatgccgttcttctgcttgtcggccatgatatagacgttgtggctgttgt | | |
| | | agttgtactccagcttgtgccccaggatgttgccgtcctccttgaagtcgatgcccttcagctc | | |
| | | gatgcggttcaccagggtgtcgccctcgaacttcacctcggcgcgggtcttgtagttgccgtc | | |
| | | gtccttgaagaagatggtgcgctcctggacgtagccttcgggcatggcggacttgaagaag | | |
| | | tcgtgctgcttcatgtggtcggggtagcggctgaagcactgcacgccgtaggtcagggtggt | | |
| | | cacgaggggggccagggcacgggcagcttgccggtggtgcagatgaacttcagggtcag | | |
| | | cttgccgtaggtggcatcgccctcgccctcgccggacacgctgaacttgtggccgtttacgtc | | |
| | | gccgtccagctcgaccaggatgggcaccaccccggtgaacagctcctcgcccttgctcacc | | |
| | | atggtggctttaccaacagtaccggaatgccaagcttgggtcctgtgttctggcggcaaacc | | |
| | | cgttgcgaaaaagaacgttcacggcgactactgcacttatatacggttctcccccaccctcg | | |
| | | ggaaaaaggcggagccagtacacgacatcactttcccagtttaccccgcgccaccttctcta | | |
| | | ggcaccggatcaattgccgacccctccccccaacttctcggggactgtgggcgatgtgcgct | | |
| | | ctgcccAAATAAAGTACCTAGACTTCCCCGAAAAAAGTTCTGCTTTTCTA | | |
| | | CTTTCTCACTGTCTTTCAAGATTTTGTCTTTCAAGCAGGTAAATCAACA | | |
| | | TTCTCGAGGCGGACCAGCGGATGTGCATCCCCGCCCCCCTAGAGCAC | | |
| | | TCAGGTGGCAGCTGTTATCCCCAGTCTCAGGACATTCCAGCATGTGGC | | |
| | | CTTCAGTCTGAGTTAAAAATTAGGTTTACCCAGAGGACTAGAATAGTA | | |
| | | GATATTTCTATATTAATAAAGATTGGTTTTTATTTTGATAGACAGGCTT | | |
| | | AGCCCCTTAGCTGACCTCTGGCTTTTCACCCTTGCTGTTACTGCAAGGT | | |
| | | GTCTTTAGCTCAATAAGGCTGTGGAAAAAAACAGGGATGAGGAGGA | | |
| | | ACGGCTCCCAGCTCCTATTTTAGCCACAAATCGTGGTGTTACTAACGA | | |
| | | CATAATTCTTGCTTAGGCTTTGCTAAATCTGAGGTTGATAATTCTCCTT | | |
| | | TAGGAGCTGCACAGCGCTCAGAACTGTGCATACTGATTTGTGATGGT | | |
| | | ACAAATTCAGTATGGGCATCGCTTGGTGCAGATGGAGGTACTGCAAG | | |
| | | GAAAGGTCCCAGCTTGACCATTTCTGAGTTTCCTGTGAGATAAACCCG | | |
| | | GTTTGAAAGAGGTTGGTACCAAATTATATATCCCTCGGCTCTACCTCG | | |
| | | CCTCCCCAAAAGGTACCAGAGCCACAGGTGTGGATTTTAACAGAATC | | |
| | | CACGGGAGGAATCGGGTCCATGTCCACCCAAGCCAAGGTTAAAAGCC | | |
| | | CACTCATCTACGGATGAGAAAATCATTTGATCACCTCAGTTAAGCGCT | | |
| | | GCCTTATTTTAACTTAATTAATAGGGGGGAGAGAGATTGGAGACTTA | | |
| | | CTATTGAAAGGGCAAGCCCTTCACTGCCTCCCACCCAAATAAAAAAGC | | |
| | | CAATTGGCCTTGTACTACAGAGCTGGCCGGACCCCTTATCCCTGTTAC | | |
| | | CCACCAATCATCCAAAAATGCGGAGGAATATCAACTTAGTGTTATTCT | | |
| | | TATTATAGTGTATTTCACACTTGTTCAGTCAAACTTAGCCAGAGTTCCA | | |
| | | ACGCCCTACTTAAAATTCAACTAGAAAGTTACCTACCAAGTACTAATT | | |
| | | AGCATTATAAAGTCAGAGCCTACAGCTCCAGGCTTTTCAGTTAGTTGT | | |
| | | TTACTAAGATAAGAAAAGACAGTCTTAGCCAGATACAGTTTACCATAA | | |
| | | TAAAAGTTAAAGAATCCCAGGGAAGCAAGTTTTTTCTTTTAGCCCTAG | | |
| | | ATTCCAGGCAGAACTATTGAGCATAGATAATTTTTCCCCCTCAGGCCA | | |
| | | GCTTTTTCTTTTTTTTTAATTTTGTTAATAAAAGGGAGGAGATGTAGTC | | |
| | | TCCCCTCCCCCAGCCTGAAACCTGCTTGCTCAGGGGTGGAGCTTCCCG | | |
| | | CTCATCGCTCTGCCACGCCCACTGCTGGAACCTGCGGAGCCACACAC | | |
| | | GTGCACCTTTCTACTGGACCAGAGATTATTCGGCGGGAATCGGGTCC | | |
| | | CCTCCCCCTTCCTTCATAACTAGTGTCCCAACAATAAAATTTGAGCTTT | | |
| | | GATCAGAATGAATTTGTCTTGGCTCCGTTTCTTCTTTCGCCCCGTCTAG | | |
| | | ATTCCTCTCTTACAGCTCGAGTGGCCTTCTCAGTCGAACCGTTCACGTT | | |
| | | GCGAGCTGCTGGCGGCCGCAACAGGGGATCCAGACATGATAAGATA | | |
| | | CATTGATGAGTTTGGACAAACCACAACTAGAATGCAGTGAAAAAAAT | | |
| | | GCTTTATTTGTGAAATTTGTGATGCTATTGCTTTATTTGTAACCATTAT | | |
| | | AAGCTGCAATAAACAAGTTAACAACAACAATTGCATTCATTTTATGTT | | |
| | | TCAGGTTCAGGGGGAGGTGTGGGAGGTTTTTTCGGATCCTCTAGAGT | | |
| | | CGACCTGCAGGCATGCAAGCTTGGCGTAATCATGGTCATAGCTGTTTC | | |
| | | CTGTGTGAAATTGTTATCCGCTCACAATTCCACACAACATACGAGCCG | | |
| | | GAAGCATAAAGTGTAAAGCCTGGGGTGCCTAATGAGTGAGCTAACTC | | |
| | | ACATTAATTGCGTTGCGCTCACTGCCCGCTTTCCAGTCGGGAAACCTG | | |
| | | TCGTGCCAGCTGCATTAATGAATCGGCCAACGCGCGGGGAGAGGCG | | |
| | | GTTTGCGTATTGGGCGCTCTTCCGCTTCCTCGCTCACTGACTCGCTGC | | |
| | | GCTCGGTCGTTCGGCTGCGGCGAGCGGTATCAGCTCACTCAAAGGCG | | |
| | | GTAATACGGTTATCCACAGAATCAGGGGATAACGCAGGAAAGAACA | | |
| | | TGTGAGCAAAAGGCCAGCAAAAGGCCAGGAACCGTAAAAAGGCCGC | | |
| | | GTTGCTGGCGTTTTTCCATAGGCTCCGCCCCCCTGACGAGCATCACAA | | |
| | | AAATCGACGCTCAAGTCAGAGGTGGCGAAACCCGACAGGACTATAA | | |
| | | AGATACCAGGCGTTTCCCCCTGGAAGCTCCCTCGTGCGCTCTCCTGTT | | |
| | | CCGACCCTGCCGCTTACCGGATACCTGTCCGCCTTTCTCCCTTCGGGA | | |
| | | AGCGTGGCGCTTTCTCATAGCTCACGCTGTAGGTATCTCAGTTCGGTG | | |
| | | TAGGTCGTTCGCTCCAAGCTGGGCTGTGTGCACGAACCCCCCGTTCA | | |
| | | GCCCGACCGCTGCGCCTTATCCGGTAACTATCGTCTTGAGTCCAACCC | | |
| | | GGTAAGACACGACTTATCGCCACTGGCAGCAGCCACTGGTAACAGGA | | |
| | | TTAGCAGAGCGAGGTATGTAGGCGGTGCTACAGAGTTCTTGAAGTG | | |
| | | GTGGCCTAACTACGGCTACACTAGAAGGACAGTATTTGGTATCTGCG | | |
| | | CTCTGCTGAAGCCAGTTACCTTCGGAAAAAGAGTTGGTAGCTCTTGAT | | |
| | | CCGGCAAACAAACCACCGCTGGTAGCGGTGGTTTTTTTGTTTGCAAGC | | |
| | | AGCAGATTACGCGCAGAAAAAAAGGATCTCAAGAAGATCCTTTGATC | | |
| | | TTTTCTACGGGGTCTGACGCTCAGTGGAACGAAAACTCACGTTAAGG | | |
| | | GATTTTGGTCATGAGATTATCAAAAAGGATCTTCACCTAGATCCTTTT | | |
| | | AAATTAAAAATGAAGTTTTAAATCAATCTAAAGTATATATGAGTAAAC | | |
| | | TTGGTCTGACAGTTACCAATGCTTAATCAGTGAGGCACCTATCTCAGC | | |
| | | GATCTGTCTATTTCGTTCATCCATAGTTGCCTGACTCCCCGTCGTGTAG | | |
| | | ATAACTACGATACGGGAGGGCTTACCATCTGGCCCCAGTGCTGCAAT | | |
| | | GATACCGCGAGACCCACGCTCACCGGCTCCAGATTTATCAGCAATAA | | |
| | | ACCAGCCAGCCGGAAGGGCCGAGCGCAGAAGTGGTCCTGCAACTTT | | |
| | | ATCCGCCTCCATCCAGTCTATTAATTGTTGCCGGGAAGCTAGAGTAAG | | |
| | | TAGTTCGCCAGTTAATAGTTTGCGCAACGTTGTTGCCATTGCTACAGG | | |
| | | CATCGTGGTGTCACGCTCGTCGTTTGGTATGGCTTCATTCAGCTCCGG | | |
| | | TTCCCAACGATCAAGGCGAGTTACATGATCCCCCATGTTGTGCAAAAA | | |
| | | AGCGGTTAGCTCCTTCGGTCCTCCGATCGTTGTCAGAAGTAAGTTGGC | | |
| | | CGCAGTGTTATCACTCATGGTTATGGCAGCACTGCATAATTCTCTTAC | | |
| | | TGTCATGCCATCCGTAAGATGCTTTTCTGTGACTGGTGAGTACTCAAC | | |
| | | CAAGTCATTCTGAGAATAGTGTATGCGGCGACCGAGTTGCTCTTGCCC | | |
| | | GGCGTCAATACGGGATAATACCGCGCCACATAGCAGAACTTTAAAAG | | |
| | | TGCTCATCATTGGAAAACGTTCTTCGGGGCGAAAACTCTCAAGGATCT | | |
| | | TACCGCTGTTGAGATCCAGTTCGATGTAACCCACTCGTGCACCCAACT | | |
| | | GATCTTCAGCATCTTTTACTTTCACCAGCGTTTCTGGGTGAGCAAAAA | | |
| | | CAGGAAGGCAAAATGCCGCAAAAAAGGGAATAAGGGCGACACGGA | | |
| | | AATGTTGAATACTCATACTCTTCCTTTTTCAATATTATTGAAGCATTTAT | | |
| | | CAGGGTTATTGTCTCATGAGCGGATACATATTTGAATGTATTTAGAAA | | |
| | | AATAAACAAATAGGGGTTCCGCGCACATTTCCCCGAAAAGTGCCACC | | |
| | | TGACGTCTAAGAAACCATTATTATCATGACATTAACCTATAAAAATAG | | |
| | | GCGTATCACGAGGCCCTTTCGTCTCGCGCGTTTCGGTGATGACGGTG | | |
| | | AAAACCTCTGACACATGCAGCTCCCGGAGACGGTCACAGCTTGTCTG | | |
| | | TAAGCGGATGCCGGGAGCAGACAAGCCCGTCAGGGCGCGTCAGCGG | | |
| | | GTGTTGGCGGGTGTCGGGGCTGGCTTAACTATGCGGCATCAGAGCA | | |
| | | GATTGTACTGAGAGTGCACCATATGCGGTGTGAAATACCGCACAGAT | | |
| | | GCGTAAGGAGAAAATACCGCATCAGGCGCCATTCGCCATTCAGGCTG | | |
| | | CGCAACTGTTGGGAAGGGCGATCGGTGCGGGCCTCTTCGCTATTACG | | |
| | | CCAGCTGGCGAAAGGGGGATGTGCTGCAAGGCGATTAAGTTGGGTA | | |
| | | ACGCCAGGGTTTTCCCAGTCACGACGTTGTAAAACGACGGCCAGT | | |

TABLE S3
ETnII LTR retrotransposon driver and template construct elements

| | | | SEQ | |
|---|---|---|---|---|
| | plasmid_ | | ID | protein_ |
| name | id | nucleic_acid_sequence | NO: | sequence |
| ETnII-B3 U3 | N/A | TGTAGTCTCCCCTCCCCTAGCCTGAAACCTGCTTGCTCGGGGTGGAGCTTCCTGCTCATTCGTTCTGCCAC | 332 | N/A |
| | | GCCCACTGCTGGAACCTGAGGAGCCACACACGTGCACCTTTCTACTGGACCAGAGATTATTCGGCGGGAA | | |
| | | TCGGGTCCCCTCCCCCTTCCTTCATAACTGGTGTCGCAACAATAAAATTT | | |
| ETnII-B3 R (full | N/A | GAGCCTTGATCA | 333 | N/A |
| length for v1 and | | | | |
| v3 design) | | | | |
| ETnII-B3 R (5′ | N/A | GCCTTGATCA | 334 | |
| truncated for v2 | | | | |
| design) | | | | |
| ETnII-B3 U5 | N/A | GAGTAACTGTCTTGGCTACATTTCTTCTTTTGCCCCGTCTAGATTCCTCTCTTACAGCTCGAGCGGCCTTCTC | 335 | N/A |
| | | AGTCGAACCGTTCACGTTGCGAGCTGCTGGCGGCCGCAACA | | |
| ETnII-B3 5′/3′ LTR | N/A | TGTAGTCTCCCCTCCCCTAGCCTGAAACCTGCTTGCTCGGGGTGGAGCTTCCTGCTCATTCGTTCTGCCAC | 336 | N/A |
| | | GCCCACTGCTGGAACCTGAGGAGCCACACACGTGCACCTTTCTACTGGACCAGAGATTATTCGGCGGGAA | | |
| | | TCGGGTCCCCTCCCCCTTCCTTCATAACTGGTGTCGCAACAATAAAATTTGAGCCTTGATCAGAGTAACTG | | |
| | | TCTTGGCTACATTTCTTCTTTTGCCCCGTCTAGATTCCTCTCTTACAGCTCGAGCGGCCTTCTCAGTCGAACC | | |
| | | GTTCACGTTGCGAGCTGCTGGCGGCCGCAACA | | |
| ETnII-B3 PBS | N/A | TGGCGCCCGAACAGGGAC | 337 | N/A |
| (shorter | | | | |
| annotation) | | | | |
| ETnII-B3 PBS | N/A | TTTTGGCGCCCGAACAGGGACCTGAAGAATGGC | 338 | N/A |
| (larger annotation) | | | | |
| ETnII-B3 5′ flank | N/A | AGAGAGATGCTAAGAGGAACGCTGCATTGGAGCTCCACAGGAAAGGATCTTCGTATCGGACATCGGAGC | 339 | N/A |
| | | AACGGACAAGTACACATGCTAGCGCTAGCTTAAAATTTCAGTTTTGTAAAGTGTTGCTGAGGATGCGGTA | | |
| | | GGATACGAATTAAGCTTGAATCAGTGCTAACCCAACGCTGGTTCTGCTTGGGTCAGCAGCGTGTTAATCG | | |
| | | GAACTAGAAACGGAAACAGGCAGGTTAGCCGCAGCTTTTTAGGAAGCTGCTTAGGTGAAAGAAGAAAG | | |
| | | GGTTTAAAGTCATGGATCAGGCGGTAGGCCGTAGCTCTCCGAAGCTACATGAGGTGTGAGAAAAGAAAG | | |
| | | GGTTTATTAAAAGGAATAGGCGGATTGCCCCAGTTAATAAAAAATACATCATAAGGGAGGAAAATGTCCC | | |
| | | AAAAAGCAGAGAGAAATATCTCTCTGGGCCTTATAGCAGGAGTACTCTGTTCCCCTTTGTGTCTTGTCTAA | | |
| | | TGTCCGGTGCACCAATCTGTTCTCGTGTTCGATTCATGTATGTTCGTGTCCAGTCTGTATGAATGAATGTTC | | |
| | | TATGTTTTGTGTTGGATAATAAAGATGGTATAAAAAACTTTATCTGCAAAGCCGAGAGCTGCCACGTGTTT | | |
| | | CAGCCAGGAATCAGACACGTGGCGAGAGGGCCCCTGCTGGAAAAACTGTTCGTTTTAGAAAATAAGGGC | | |
| | | GAGTGCACAGCCTCTAAGTTTCAGAGTAAAAAAGCTAATAAATGGTTCATGATTAATGTGTTTGACAATG | | |
| | | GTAAAGTGTTTTTTATTTTATGATTGTAGCTACAAAAATTATTATTCTCTGATTGGTCTAAATGTAACTGCTT | | |
| | | CATTTGGTTCTTTTTTATTGGTAATGTGCTCTAAGTGTTTTCACAATCAGCTCATAAGTTGTTGGTTAAGAT | | |
| | | TAATAATTGTTACATTGCTACAGATGGTTAGTGTTAAATTTGATAACTCAAGTTTAGAGTCCTTCCAACACA | | |
| | | TGGCATAAGGCAGCCCAAGAGGCTGGGTCTCTAAAGATATTTCTAGTTTAGGTAATAATTAATATGGTTC | | |
| | | GTATCCTAAATAGTAAAATTTAAAATAAGATTTAAAGCAATGTCTCTTTATTAAAGCATTAAAGCTTGCTTT | | |
| | | AATAGGTATTCATAGGTATTAATTGACATCCAAACTTCGTAATACGATAGTAATGCTTCTAATATTGATTTT | | |
| | | AAAGATAATAAATTGTTTTAAACTTGGGTTTTGCTTTCCCAAGGTTATAGGTATTATCCTAACCTTGCACAA | | |
| | | AAAACTTAAAAATTATGGTTAAAACTGCTATTGTTCCATTGACTGCAGCTTGCAGTTTGATTTCAAATTTAA | | |
| | | GATCTTTAATTCACCTGTATACTGTAATTAAGATAATTACAAGAGTAATCATCTTATGAGAGCGCTCATAC | | |
| | | AGCTCACTTCATACAAAACTGTGACAGAGTTATCTAGTTATGTTTGTCTTTGTGAATAGATTAGACAAACA | | |
| | | GTTTGGTTATAGTTGCTGCCTGGCAGGAAACTGTAGTACAGGCAATTTTTTCACAACACTAAAGTTGTGAA | | |
| | | GAACGTTTTAACTGTAAGTCATCTTAAGAAAGAGTATCAAAATTTAGAGGCGTAGACAGTTATATTGTTTC | | |
| | | TCTAAAATCGGTCCTTATTACAGGAGGGCCAGGATGCTCAGATTAAAAAGTATTTTACGTTTGAGTCAATG | | |
| | | CAGGGCTCTGGGCAGCCCCAGAGCGGCTTGTGGCCTTTCTTTTGTTTTGCAAACAGTGCCTGAGAAAGAT | | |
| | | TTTTCCCTGTGTTCAAGAAAAATTCTTTTTAACAGTGTTGCAGATCTATTCAGATGTTTAAAATAATGCTTA | | |
| | | AATTCAAAGAGTTTTGCTTCTAGTGAACTGTAATCACTAGAAAATTTTGCCTCTAGGTATGGCTAATGTAA | | |
| | | CTTTACATTATGTAAGAAAAATTTTATTGTTTCTGCTTCTATACAAGAAGCCAAGAGTTTTAATCTTTCAGT | | |
| | | GTATATTGTTTCCTAAGTGAAAAGTATTTTATTAACTAATGCTTCTTAAAGTTTACCTTAAATCCTTGCTCTC | | |
| | | ACCCAAAAGATTCAGAGACAATATCCTTTTATTACTTAGGGTTTTAGTTTACTACAAAAGTTTCTACAAAAA | | |
| | | ATAAAGCTTTTATAATTGTTATTAATTGGTAATTAAAAATTGGTTGTGCCCAAAACAATTCTTTGGCCAAAA | | |
| | | AAAAAAACATTATTGTAAAGTCATTTTTCTCATCCTCCCAGCCAATCGTTGGCCCACGTGGGCCCAACTAG | | |
| | | CTTCTGTGGGGCAGAGTCTTAAGACACAGTTTCCCCTGTTCCAGCACAGATGATCTAGTTGTGTGCTGTAG | | |
| | | ATGGTGTTTTAAAATGCTGAACAATCAAACCTTAATTTGTATATTAATAGTCAATGCCATATCTCTGAGCTC | | |
| | | ACAATTGCTTAAATTGTTCATCCCTCAGATACTATTAATTCTCAAATTTACAATTGCTTATGCATATTTCTAG | | |
| | | TTAATAAATAAATTATGCACATGTGACTCTTAATAACTTTACAAGCCTTCTAGTTACAACTGCTCCTTAAGA | | |
| | | AAATTGATTAAAAGTGCAATTAGTCACTGCCCCTTTACAGCCAAGTATTTAAAATGTTTTGTCAACTAGTTA | | |
| | | TTAATTCAAAAGTTTAGGTATTGTAAAATTTTAAAACTTTAACTTCTTAAAAGACAAAAAAGAGAGAAATT | | |
| | | GTATCCCCGTGCATGCTATTTAGT | | |
| ETnII-B3 3′ flank | N/A | GCATTCCCATGCACACTATTAAAGTCTTACCTTTATTTTCAAAATCTAATATTTTAATGTCAAAGAGTTTAAT | 340 | N/A |
| | | AAATGCTTTATAGTATCTTAAAGGGATCTACTTATTGGCTTATAGATTAATCCTAAAACAGCTACCTTATTA | | |
| | | AAAAAGGGAAAAACAGGTTTTCTCCACAGAACGCTGCAGAAGCATATTAATAAATTCGTGTGACGAGCTG | | |
| | | GTAGGTAAGTTGACTCATGTCCTGATTAAATTGACTAAAAAACTAAATTAAATTCATGTTTTAGATCCATCC | | |
| | | TTACTTGTCATTTTTCCAGTTTAGACTAGCTTCTAGCCTTTTAACTTTATGACAATAGTACATCAGAGACTGT | | |
| | | ATATTCAGACTTAGTAAAATTAGTCATTTAATAGAGTCATAATGATTTTTCTCCTTTCTTCAGTGTGACCAG | | |
| | | CCATTCTAACTCAATCTTAGACTGGTCCTAATATTCAGTCCAATGTTAGAGATTCCTATATTCTAAATTACCT | | |
| | | AGCAAGTTAATTAAAGAGCAATTGGTCACTTAATACCCCCTGACTAACAAATGGAAGGGTCCAGATCCAG | | |
| | | TTCTAATTTGGGGTAGGGACTCAGTTTGTGTTTTTTCACGAGATGAAGATGGAGCGCGGTGGCTGCCAGA | | |
| | | GAGATTAATTCGTCAGATGAACACAGATTCTGACTCTTCTGGTAAGTATCATTCTAAAGACTAAAATTCCT | | |
| | | TTTGTGCTTAAAATTCAGCTGAGAGCAACAGCTCTCAAAGGTGTTCTCCAGCTACTCTCTGAACCAGCTCC | | |
| | | CGACAGGAGGCCGGAGACTAGCCTCAGCTTTACAATTTGCATTTGAATAAAGTACCTAGACTTCCCGGAA | | |
| | | AGAAGTTCTGCTTTCCTACTTTCTCACTGTCTTTCAAGATTTTGTCTTTCAAGCAGGTAAATCAACATTCCCG | | |
| | | AGGCGGACCAGTAGATGTGCATCCCCGCCCCCCTAGAGCACACAGGTGGCAGCTGTTACCCCCAGTCTCA | | |
| | | GGACATTTCCAGCATGTGGCTTTCAGTCTGAGTTAAAAATTTAGGTTTACCTAGAGGGCTAGAAGAGTAG | | |
| | | ATTTTTCTATATTAATAAAGATTGGTTTTTATTTTGATAGACAGGCTTAGCCCCTTAGCTGACCTCTGGCTTT | | |
| | | TCACCCTTGCTGTTACTGCAAGGTGTCCTTAGCTCAATAGGCTGTGGAAAAAACAGGGATGAGGAGGAA | | |
| | | CGACTTCCAGCTCCTATTTTACCCACAAATCGTGGTGTTATTAACGACATAATTCTTGCTTAGGCTTTGCTA | | |
| | | ATTCTGAGGTTGATAATTCTCCTTTAGGAGCTGCACAGCACTCAGAACTGTGCATACTGGTTTGTGATTGT | | |
| | | ACAAATTCAGTATGGGCACCGCTTGGTGCAGAGATACTTACTGCAAGGGAAGGTCCGGCTTGACCATTTC | | |
| | | TGAGTTTCCTGTGAGATAAACCCGGTTTGAAAGAGGTTGGTACCAAATTTTGGTTAAAAATAAAAAATAT | | |
| | | TCTCCGGCTCTACCTCGCCTCCCCAAAAGGTACCAAGAGCCACATGTGTGGGTTTTACCCACGGGAGGAA | | |
| | | TCGGGTCCATGTCCACCCAAGCCAAGGTTAAAAGCCCACTCATCTACGGATGAGAAAATCATTTGATCACC | | |
| | | TCAGTTAAGCGTTGCCTTATTTAACTTAATTAATAGGGGGGAGAGAGATTGGAGACGTACTATTGAAAGG | | |
| | | GCAAGCCCTTCACTGCCTCCCACCCAAATAAAAAGGCCAATTGGCCTTGTACTACAAGAGCCGGTCACTCC | | |
| | | TTCTCCCTGTTTCCCACCTATCTTCCAAAAATGCTAAGGAATTCAACTTAGTGTTATTTTCACATCGTTCAGT | | |
| | | CAAACTTAGCCAGAGTTCCAAACGCCCTACTTAAAATTCAACTAGAAAGTTACCTACCAAGTACTAATTAG | | |
| | | CATTATAAAGTCAGAGTCTGCAGCTCCAGGCCTTTCAGTTGTTTACTAGAAAGGACAGTCTTAAGCCAGAT | | |
| | | ACAGTTTACCATAAGAAAAGTTAAAGATTCCCAGTGAAGCAAGTTTTTTCTTTAGCCCTAGATTCCAGGCA | | |
| | | GAACTATTGAGCATAGATAATTTTCCCCCC | | |
| ETnII-B3 PPT | N/A | AGGGAGGAGA | 341 | N/A |
| (shorter | | | | |
| annotation) | | | | |
| ETnII-B3 PPT | N/A | TCAGGCCAGCTTTTTCTTTTTTTTTTTATTTTGTTAATAACAGGGAGGAGA | 342 | N/A |
| (larger annotation) | | | | |
| TEMPLATE_COMPACT_ | PLV10059 | GAATTCGAGCTTGCATGCCTGCAGGTCGTTACATAACTTACGGTAAATGGCCCGCCTGGCTGACCGCCCA | 343 | N/A |
| pCMV_R-U5- | | ACGACCCCCGCCCATTGACGTCAATAATGACGTATGTTCCCATAGTAACGCCAATAGGGACTTTCCATTGA | | |
| ETnII-B3_EF1- | | CGTCAATGGGTGGAGTATTTACGGTAAACTGCCCACTTGGCAGTACATCAAGTGTATCATATGCCAAGTA | | |
| GFPai-LTR_v1 | | CGCCCCCTATTGACGTCAATGACGGTAAATGGCCCGCCTGGCATTATGCCCAGTACATGACCTTATGGGA | | |
| | | CTTTCCTACTTGGCAGTACATCTACGTATTAGTCATCGCTATTACCATGGTGATGCGGTTTTGGCAGTACAT | | |
| | | CAATGGGCGTGGATAGCGGTTTGACTCACGGGGATTTCCAAGTCTCCACCCCATTGACGTCAATGGGAGT | | |
| | | TTGTTTTGGCACCAAAATCAACGGGACTTTCCAAAATGTCGTAACAACTCCGCCCCATTGACGCAAATGGG | | |
| | | CGGTAGGCGTGTACGGTGGGAGGTCTATATAAGCAGAGCTCGTTTAGTGAACCGTCAGAGCCTTGATCA | | |
| | | GAGTAACTGTCTTGGCTACATTTCTTCTTTTGCCCCGTCTAGATTCCTCTCTTACAGCTCGAGCGGCCTTCTC | | |
| | | AGTCGAACCGTTCACGTTGCGAGCTGCTGGCGGCCGCAACATTTTGGCGCCCGAACAGGGACCTGAAGA | | |
| | | ATGGCgaacaaacgacccaacacccgtgcgttttattctgtctttttattgccgatcccccggccgctttacttgtacagctcgtccatgcc | | |
| | | gagagtgatcccggcggcggtcacgaactccagcaggaccatgtgatcgcgcttctcgttggggtctttgctcagggcggactgggtgctc | | |
| | | aggtaagtatcaaggttacaagacaggtttaaggagaccaatagaaactgggcttgtcgagacagagaagactcttgcgtttctgatagg | | |
| | | cacctattggtcttactgacatccactttgcctttctctccacaggtagtggttgtcgggcagcagcacggggccgtcgccgatgggggtgt | | |
| | | tctgctggtagtggtcggcgagctgcacgctgccgtcctcgatgttgtggcggatcttgaagttcaccttgatgccgttcttctgcttgtcg | | |
| | | gccatgatatagacgttgtggctgttgtagttgtactccagcttgtgccccaggatgttgccgtcctccttgaagtcgatgcccttcagctc | | |
| | | gatgcggttcaccagggtgtcgccctcgaacttcacctcggcgcgggtcttgtagttgccgtcgtccttgaagaagatggtgcgctcctgga | | |
| | | cgtagccttcgggcatggcggacttgaagaagtcgtgctgcttcatgtggtcggggtagcggctgaagcactgcacgccgtaggtcagggtg | | |
| | | gtcacgagggtgggccagggcacgggcagcttgccggtggtgcagatgaacttcagggtcagcttgccgtaggtggcategccctcgccctc | | |
| | | gccggacacgctgaacttgtggccgtttacgtcgccgtccagctcgaccaggatgggcaccaccccggtgaacagctcctcgcccttgctca | | |
| | | ccatggtggctttaccaacagtaccggaatgccaagcttgggtcctgtgttctggcggcaaacccgttgcgaaaaagaacgttcacggcgac | | |
| | | tactgcacttatatacggttctcccccaccctcgggaaaaaggcggagccagtacacgacatcactttcccagtttaccccgcgccaccttc | | |
| | | tctaggcaccggatcaattgccgacccctccccccaacttctcggggactgtgggcgatgtgcgctctgcccTCAGGCCAGCTTTTTCT | | |
| | | TTTTTTTTTTATTTTGTTAATAACAGGGAGGAGATGTAGTCTCCCCTCCCCTAGCCTGAAACCTGCTTGCTC | | |
| | | GGGGTGGAGCTTCCTGCTCATTCGTTCTGCCACGCCCACTGCTGGAACCTGAGGAGCCACACACGTGCAC | | |
| | | CTTTCTACTGGACCAGAGATTATTCGGCGGGAATCGGGTCCCCTCCCCCTTCCTTCATAACTGGTGTCGCA | | |
| | | ACAATAAAATTTGAGCCTTGATCAGAGTAACTGTCTTGGCTACATTTCTTCTTTTGCCCCGTCTAGATTCCT | | |
| | | CTCTTACAGCTCGAGCGGCCTTCTCAGTCGAACCGTTCACGTTGCGAGCTGCTGGCGGCCGCAACAGGGG | | |
| | | ATCCAGACATGATAAGATACATTGATGAGTTTGGACAAACCACAACTAGAATGCAGTGAAAAAAATGCTT | | |
| | | TATTTGTGAAATTTGTGATGCTATTGCTTTATTTGTAACCATTATAAGCTGCAATAAACAAGTTAACAACAA | | |
| | | CAATTGCATTCATTTTATGTTTCAGGTTCAGGGGGAGGTGTGGGAGGTTTTTTCGGATCCTCTAGAGTCGA | | |
| | | CCTGCAGGCATGCAAGCTTGGCGTAATCATGGTCATAGCTGTTTCCTGTGTGAAATTGTTATCCGCTCACA | | |
| | | ATTCCACACAACATACGAGCCGGAAGCATAAAGTGTAAAGCCTGGGGTGCCTAATGAGTGAGCTAACTC | | |
| | | ACATTAATTGCGTTGCGCTCACTGCCCGCTTTCCAGTCGGGAAACCTGTCGTGCCAGCTGCATTAATGAAT | | |
| | | CGGCCAACGCGCGGGGAGAGGCGGTTTGCGTATTGGGCGCTCTTCCGCTTCCTCGCTCACTGACTCGCTG | | |
| | | CGCTCGGTCGTTCGGCTGCGGCGAGCGGTATCAGCTCACTCAAAGGCGGTAATACGGTTATCCACAGAAT | | |
| | | CAGGGGATAACGCAGGAAAGAACATGTGAGCAAAAGGCCAGCAAAAGGCCAGGAACCGTAAAAAGGC | | |
| | | CGCGTTGCTGGCGTTTTTCCATAGGCTCCGCCCCCCTGACGAGCATCACAAAAATCGACGCTCAAGTCAG | | |
| | | AGGTGGCGAAACCCGACAGGACTATAAAGATACCAGGCGTTTCCCCCTGGAAGCTCCCTCGTGCGCTCTC | | |
| | | CTGTTCCGACCCTGCCGCTTACCGGATACCTGTCCGCCTTTCTCCCTTCGGGAAGCGTGGCGCTTTCTCATA | | |
| | | GCTCACGCTGTAGGTATCTCAGTTCGGTGTAGGTCGTTCGCTCCAAGCTGGGCTGTGTGCACGAACCCCC | | |
| | | CGTTCAGCCCGACCGCTGCGCCTTATCCGGTAACTATCGTCTTGAGTCCAACCCGGTAAGACACGACTTAT | | |
| | | CGCCACTGGCAGCAGCCACTGGTAACAGGATTAGCAGAGCGAGGTATGTAGGCGGTGCTACAGAGTTCT | | |
| | | TGAAGTGGTGGCCTAACTACGGCTACACTAGAAGGACAGTATTTGGTATCTGCGCTCTGCTGAAGCCAGT | | |
| | | TACCTTCGGAAAAAGAGTTGGTAGCTCTTGATCCGGCAAACAAACCACCGCTGGTAGCGGTGGTTTTTTT | | |
| | | GTTTGCAAGCAGCAGATTACGCGCAGAAAAAAAGGATCTCAAGAAGATCCTTTGATCTTTTCTACGGGGT | | |
| | | CTGACGCTCAGTGGAACGAAAACTCACGTTAAGGGATTTTGGTCATGAGATTATCAAAAAGGATCTTCAC | | |
| | | CTAGATCCTTTTAAATTAAAAATGAAGTTTTAAATCAATCTAAAGTATATATGAGTAAACTTGGTCTGACA | | |
| | | GTTACCAATGCTTAATCAGTGAGGCACCTATCTCAGCGATCTGTCTATTTCGTTCATCCATAGTTGCCTGAC | | |
| | | TCCCCGTCGTGTAGATAACTACGATACGGGAGGGCTTACCATCTGGCCCCAGTGCTGCAATGATACCGCG | | |
| | | AGACCCACGCTCACCGGCTCCAGATTTATCAGCAATAAACCAGCCAGCCGGAAGGGCCGAGCGCAGAAG | | |
| | | TGGTCCTGCAACTTTATCCGCCTCCATCCAGTCTATTAATTGTTGCCGGGAAGCTAGAGTAAGTAGTTCGC | | |
| | | CAGTTAATAGTTTGCGCAACGTTGTTGCCATTGCTACAGGCATCGTGGTGTCACGCTCGTCGTTTGGTATG | | |
| | | GCTTCATTCAGCTCCGGTTCCCAACGATCAAGGCGAGTTACATGATCCCCCATGTTGTGCAAAAAAGCGG | | |
| | | TTAGCTCCTTCGGTCCTCCGATCGTTGTCAGAAGTAAGTTGGCCGCAGTGTTATCACTCATGGTTATGGCA | | |
| | | GCACTGCATAATTCTCTTACTGTCATGCCATCCGTAAGATGCTTTTCTGTGACTGGTGAGTACTCAACCAA | | |
| | | GTCATTCTGAGAATAGTGTATGCGGCGACCGAGTTGCTCTTGCCCGGCGTCAATACGGGATAATACCGCG | | |
| | | CCACATAGCAGAACTTTAAAAGTGCTCATCATTGGAAAACGTTCTTCGGGGCGAAAACTCTCAAGGATCT | | |
| | | TACCGCTGTTGAGATCCAGTTCGATGTAACCCACTCGTGCACCCAACTGATCTTCAGCATCTTTTACTTTCA | | |
| | | CCAGCGTTTCTGGGTGAGCAAAAACAGGAAGGCAAAATGCCGCAAAAAAGGGAATAAGGGCGACACGG | | |
| | | AAATGTTGAATACTCATACTCTTCCTTTTTCAATATTATTGAAGCATTTATCAGGGTTATTGTCTCATGAGC | | |
| | | GGATACATATTTGAATGTATTTAGAAAAATAAACAAATAGGGGTTCCGCGCACATTTCCCCGAAAAGTGC | | |
| | | CACCTGACGTCTAAGAAACCATTATTATCATGACATTAACCTATAAAAATAGGCGTATCACGAGGCCCTTT | | |
| | | CGTCTCGCGCGTTTCGGTGATGACGGTGAAAACCTCTGACACATGCAGCTCCCGGAGACGGTCACAGCTT | | |
| | | GTCTGTAAGCGGATGCCGGGAGCAGACAAGCCCGTCAGGGCGCGTCAGCGGGTGTTGGCGGGTGTCGG | | |
| | | GGCTGGCTTAACTATGCGGCATCAGAGCAGATTGTACTGAGAGTGCACCATATGCGGTGTGAAATACCG | | |
| | | CACAGATGCGTAAGGAGAAAATACCGCATCAGGCGCCATTCGCCATTCAGGCTGCGCAACTGTTGGGAA | | |
| | | GGGCGATCGGTGCGGGCCTCTTCGCTATTACGCCAGCTGGCGAAAGGGGGATGTGCTGCAAGGCGATTA | | |
| | | AGTTGGGTAACGCCAGGGTTTTCCCAGTCACGACGTTGTAAAACGACGGCCAGT | | |
| TEMPLATE_COMPACT_ | PLV10060 | GAATTCGAGCTTGCATGCCTGCAGGTCGTTACATAACTTACGGTAAATGGCCCGCCTGGCTGACCGCCCA | 344 | N/A |
| pCMV_R-U5- | | ACGACCCCCGCCCATTGACGTCAATAATGACGTATGTTCCCATAGTAACGCCAATAGGGACTTTCCATTGA | | |
| ETnII-B3_EF1- | | CGTCAATGGGTGGAGTATTTACGGTAAACTGCCCACTTGGCAGTACATCAAGTGTATCATATGCCAAGTA | | |
| GFPai-LTR_v2 | | CGCCCCCTATTGACGTCAATGACGGTAAATGGCCCGCCTGGCATTATGCCCAGTACATGACCTTATGGGA | | |
| | | CTTTCCTACTTGGCAGTACATCTACGTATTAGTCATCGCTATTACCATGGTGATGCGGTTTTGGCAGTACAT | | |
| | | CAATGGGCGTGGATAGCGGTTTGACTCACGGGGATTTCCAAGTCTCCACCCCATTGACGTCAATGGGAGT | | |
| | | TTGTTTTGGCACCAAAATCAACGGGACTTTCCAAAATGTCGTAACAACTCCGCCCCATTGACGCAAATGGG | | |
| | | CGGTAGGCGTGTACGGTGGGAGGTCTATATAAGCAGAGCTCGTTTAGTGAACCGTCAGCCTTGATCAGA | | |
| | | GTAACTGTCTTGGCTACATTTCTTCTTTTGCCCCGTCTAGATTCCTCTCTTACAGCTCGAGCGGCCTTCTCAG | | |
| | | TCGAACCGTTCACGTTGCGAGCTGCTGGCGGCCGCAACATTTTGGCGCCCGAACAGGGACCTGAAGAAT | | |
| | | GGCgaacaaacgacccaacacccgtgcgttttattctgtctttttattgccgatcccccggccgctttacttgtacagctcgtccatgccgag | | |
| | | agtgatcccggcggcggtcacgaactccagcaggaccatgtgatcgcgcttctcgttggggtctttgctcagggcggactgggtgctcaggt | | |
| | | aagtatcaaggttacaagacaggtttaaggagaccaatagaaactgggcttgtcgagacagagaagactcttgcgtttctgataggcacc | | |
| | | tattggtcttactgacatccactttgcctttctctccacaggtagtggttgtcgggcagcagcacggggccgtcgccgatgggggtgttctgct | | |
| | | ggtagtggtcggcgagctgcacgctgccgtcctcgatgttgtggcggatcttgaagttcaccttgatgccgttcttctgcttgtcggccatgat | | |
| | | atagacgttgtggctgttgtagttgtactccagcttgtgccccaggatgttgccgtcctccttgaagtcgatgcccttcagctcgatgcggttc | | |
| | | accagggtgtcgccctcgaacttcacctcggcgcgggtcttgtagttgccgtcgtccttgaagaagatggtgcgctcctggacgtagccttcg | | |
| | | ggcatggcggacttgaagaagtcgtgctgcttcatgtggtcggggtagcggctgaagcactgcacgccgtaggtcagggtggtcacgagg | | |
| | | gtgggccagggcacgggcagcttgccggtggtgcagatgaacttcagggtcagcttgccgtaggtggcatcgccctcgccctcgccggaca | | |
| | | cgctgaacttgtggccgtttacgtcgccgtccagctcgaccaggatgggcaccaccccggtgaacagctcctcgcccttgctcaccatggtg | | |
| | | gctttaccaacagtaccggaatgccaagcttgggtcctgtgttctggcggcaaacccgttgcgaaaaagaacgttcacggcgactactgca | | |
| | | cttatatacggttctcccccaccctcgggaaaaaggcggagccagtacacgacatcactttcccagtttaccccgcgccaccttctctaggc | | |
| | | accggatcaattgccgacccctccccccaacttctcggggactgtgggcgatgtgcgctctgcccTCAGGCCAGCTTTTTCTTTTTT | | |
| | | TTTTTATTTTGTTAATAACAGGGAGGAGATGTAGTCTCCCCTCCCCTAGCCTGAAACCTGCTTGCTCGGGG | | |
| | | TGGAGCTTCCTGCTCATTCGTTCTGCCACGCCCACTGCTGGAACCTGAGGAGCCACACACGTGCACCTTTC | | |
| | | TACTGGACCAGAGATTATTCGGCGGGAATCGGGTCCCCTCCCCCTTCCTTCATAACTGGTGTCGCAACAAT | | |
| | | AAAATTTGAGCCTTGATCAGAGTAACTGTCTTGGCTACATTTCTTCTTTTGCCCCGTCTAGATTCCTCTCTTA | | |
| | | CAGCTCGAGCGGCCTTCTCAGTCGAACCGTTCACGTTGCGAGCTGCTGGCGGCCGCAACAGGGGATCCA | | |
| | | GACATGATAAGATACATTGATGAGTTTGGACAAACCACAACTAGAATGCAGTGAAAAAAATGCTTTATTT | | |
| | | GTGAAATTTGTGATGCTATTGCTTTATTTGTAACCATTATAAGCTGCAATAAACAAGTTAACAACAACAAT | | |
| | | TGCATTCATTTTATGTTTCAGGTTCAGGGGGAGGTGTGGGAGGTTTTTTCGGATCCTCTAGAGTCGACCTG | | |
| | | CAGGCATGCAAGCTTGGCGTAATCATGGTCATAGCTGTTTCCTGTGTGAAATTGTTATCCGCTCACAATTC | | |
| | | CACACAACATACGAGCCGGAAGCATAAAGTGTAAAGCCTGGGGTGCCTAATGAGTGAGCTAACTCACAT | | |
| | | TAATTGCGTTGCGCTCACTGCCCGCTTTCCAGTCGGGAAACCTGTCGTGCCAGCTGCATTAATGAATCGGC | | |
| | | CAACGCGCGGGGAGAGGCGGTTTGCGTATTGGGCGCTCTTCCGCTTCCTCGCTCACTGACTCGCTGCGCT | | |
| | | CGGTCGTTCGGCTGCGGCGAGCGGTATCAGCTCACTCAAAGGCGGTAATACGGTTATCCACAGAATCAG | | |
| | | GGGATAACGCAGGAAAGAACATGTGAGCAAAAGGCCAGCAAAAGGCCAGGAACCGTAAAAAGGCCGC | | |
| | | GTTGCTGGCGTTTTTCCATAGGCTCCGCCCCCCTGACGAGCATCACAAAAATCGACGCTCAAGTCAGAGG | | |
| | | TGGCGAAACCCGACAGGACTATAAAGATACCAGGCGTTTCCCCCTGGAAGCTCCCTCGTGCGCTCTCCTG | | |
| | | TTCCGACCCTGCCGCTTACCGGATACCTGTCCGCCTTTCTCCCTTCGGGAAGCGTGGCGCTTTCTCATAGCT | | |
| | | CACGCTGTAGGTATCTCAGTTCGGTGTAGGTCGTTCGCTCCAAGCTGGGCTGTGTGCACGAACCCCCCGT | | |
| | | TCAGCCCGACCGCTGCGCCTTATCCGGTAACTATCGTCTTGAGTCCAACCCGGTAAGACACGACTTATCGC | | |
| | | CACTGGCAGCAGCCACTGGTAACAGGATTAGCAGAGCGAGGTATGTAGGCGGTGCTACAGAGTTCTTGA | | |
| | | AGTGGTGGCCTAACTACGGCTACACTAGAAGGACAGTATTTGGTATCTGCGCTCTGCTGAAGCCAGTTAC | | |
| | | CTTCGGAAAAAGAGTTGGTAGCTCTTGATCCGGCAAACAAACCACCGCTGGTAGCGGTGGTTTTTTTGTTT | | |
| | | GCAAGCAGCAGATTACGCGCAGAAAAAAAGGATCTCAAGAAGATCCTTTGATCTTTTCTACGGGGTCTGA | | |
| | | CGCTCAGTGGAACGAAAACTCACGTTAAGGGATTTTGGTCATGAGATTATCAAAAAGGATCTTCACCTAG | | |
| | | ATCCTTTTAAATTAAAAATGAAGTTTTAAATCAATCTAAAGTATATATGAGTAAACTTGGTCTGACAGTTAC | | |
| | | CAATGCTTAATCAGTGAGGCACCTATCTCAGCGATCTGTCTATTTCGTTCATCCATAGTTGCCTGACTCCCC | | |
| | | GTCGTGTAGATAACTACGATACGGGAGGGCTTACCATCTGGCCCCAGTGCTGCAATGATACCGCGAGACC | | |
| | | CACGCTCACCGGCTCCAGATTTATCAGCAATAAACCAGCCAGCCGGAAGGGCCGAGCGCAGAAGTGGTC | | |
| | | CTGCAACTTTATCCGCCTCCATCCAGTCTATTAATTGTTGCCGGGAAGCTAGAGTAAGTAGTTCGCCAGTT | | |
| | | AATAGTTTGCGCAACGTTGTTGCCATTGCTACAGGCATCGTGGTGTCACGCTCGTCGTTTGGTATGGCTTC | | |
| | | ATTCAGCTCCGGTTCCCAACGATCAAGGCGAGTTACATGATCCCCCATGTTGTGCAAAAAAGCGGTTAGC | | |
| | | TCCTTCGGTCCTCCGATCGTTGTCAGAAGTAAGTTGGCCGCAGTGTTATCACTCATGGTTATGGCAGCACT | | |
| | | GCATAATTCTCTTACTGTCATGCCATCCGTAAGATGCTTTTCTGTGACTGGTGAGTACTCAACCAAGTCATT | | |
| | | CTGAGAATAGTGTATGCGGCGACCGAGTTGCTCTTGCCCGGCGTCAATACGGGATAATACCGCGCCACAT | | |
| | | AGCAGAACTTTAAAAGTGCTCATCATTGGAAAACGTTCTTCGGGGCGAAAACTCTCAAGGATCTTACCGC | | |
| | | TGTTGAGATCCAGTTCGATGTAACCCACTCGTGCACCCAACTGATCTTCAGCATCTTTTACTTTCACCAGCG | | |
| | | TTTCTGGGTGAGCAAAAACAGGAAGGCAAAATGCCGCAAAAAAGGGAATAAGGGCGACACGGAAATGT | | |
| | | TGAATACTCATACTCTTCCTTTTTCAATATTATTGAAGCATTTATCAGGGTTATTGTCTCATGAGCGGATAC | | |
| | | ATATTTGAATGTATTTAGAAAAATAAACAAATAGGGGTTCCGCGCACATTTCCCCGAAAAGTGCCACCTG | | |
| | | ACGTCTAAGAAACCATTATTATCATGACATTAACCTATAAAAATAGGCGTATCACGAGGCCCTTTCGTCTC | | |
| | | GCGCGTTTCGGTGATGACGGTGAAAACCTCTGACACATGCAGCTCCCGGAGACGGTCACAGCTTGTCTGT | | |
| | | AAGCGGATGCCGGGAGCAGACAAGCCCGTCAGGGCGCGTCAGCGGGTGTTGGCGGGTGTCGGGGCTG | | |
| | | GCTTAACTATGCGGCATCAGAGCAGATTGTACTGAGAGTGCACCATATGCGGTGTGAAATACCGCACAG | | |
| | | ATGCGTAAGGAGAAAATACCGCATCAGGCGCCATTCGCCATTCAGGCTGCGCAACTGTTGGGAAGGGCG | | |
| | | ATCGGTGCGGGCCTCTTCGCTATTACGCCAGCTGGCGAAAGGGGGATGTGCTGCAAGGCGATTAAGTTG | | |
| | | GGTAACGCCAGGGTTTTCCCAGTCACGACGTTGTAAAACGACGGCCAGT | | |
| TEMPLATE_COMPACT_ | PLV10061 | GAATTCGAGCTTGCATGCCTGCAGGTCGTTACATAACTTACGGTAAATGGCCCGCCTGGCTGACCGCCCA | 345 | N/A |
| pCMV_R-U5- | | ACGACCCCCGCCCATTGACGTCAATAATGACGTATGTTCCCATAGTAACGCCAATAGGGACTTTCCATTGA | | |
| ETnII-B3_EF1- | | CGTCAATGGGTGGAGTATTTACGGTAAACTGCCCACTTGGCAGTACATCAAGTGTATCATATGCCAAGTA | | |
| GFPai-LTR_v3 | | CGCCCCCTATTGACGTCAATGACGGTAAATGGCCCGCCTGGCATTATGCCCAGTACATGACCTTATGGGA | | |
| | | CTTTCCTACTTGGCAGTACATCTACGTATTAGTCATCGCTATTACCATGGTGATGCGGTTTTGGCAGTACAT | | |
| | | CAATGGGCGTGGATAGCGGTTTGACTCACGGGGATTTCCAAGTCTCCACCCCATTGACGTCAATGGGAGT | | |
| | | TTGTTTTGGCACCAAAATCAACGGGACTTTCCAAAATGTCGTAACAACTCCGCCCCATTGACGCAAATGGG | | |
| | | CGGTAGGCGTGTACGGTGGGAGGTCTATATAAGCAGAGCTGAGCCTTGATCAGAGTAACTGTCTTGGCT | | |
| | | ACATTTCTTCTTTTGCCCCGTCTAGATTCCTCTCTTACAGCTCGAGCGGCCTTCTCAGTCGAACCGTTCACG | | |
| | | TTGCGAGCTGCTGGCGGCCGCAACATTTTGGCGCCCGAACAGGGACCTGAAGAATGGCgaacaaacgaccca | | |
| | | acacccgtgcgttttattctgtctttttattgccgatcccccggccgctttacttgtacagctcgtccatgccgagagtgatcccggcggcg | | |
| | | gtcacgaactccagcaggaccatgtgatcgcgcttctcgttggggtctttgctcagggcggactgggtgctcaggtaagtatcaaggttaca | | |
| | | agacaggtttaaggagaccaatagaaactgggcttgtcgagacagagaagactcttgcgtttctgataggcacctattggtcttactgacat | | |
| | | ccactttgcctttctctccacaggtagtggttgtcgggcagcagcacggggccgtcgccgatgggggtgttctgctggtagtggtcggcgag | | |
| | | ctgcacgctgccgtcctcgatgttgtggcggatcttgaagttcaccttgatgccgttcttctgcttgtcggccatgatatagacgttgtggc | | |
| | | tgttgtagttgtactccagcttgtgccccaggatgttgccgtcctccttgaagtcgatgcccttcagctcgatgcggttcaccagggtgtcg | | |
| | | ccctcgaacttcacctcggcgcgggtcttgtagttgccgtcgtccttgaagaagatggtgcgctcctggacgtagccttcgggcatggcgga | | |
| | | cttgaagaagtcgtgctgcttcatgtggtcggggtagcggctgaagcactgcacgccgtaggtcagggtggtcacgagggtgggccagggca | | |
| | | cgggcagcttgccggtggtgcagatgaacttcagggtcagcttgccgtaggtggcatcgccctcgccctcgccggacacgctgaacttgtgg | | |
| | | ccgtttacgtcgccgtccagctcgaccaggatgggcaccaccccggtgaacagctcctcgcccttgctcaccatggtggctttaccaacagt | | |
| | | accggaatgccaagcttgggtcctgtgttctggcggcaaacccgttgcgaaaaagaacgttcacggcgactactgcacttatatacggttct | | |
| | | cccccaccctcgggaaaaaggcggagccagtacacgacatcactttcccagtttaccccgcgccaccttctctaggcaccggatcaattgcc | | |
| | | gacccctccccccaacttctcggggactgtgggcgatgtgcgctctgcccTCAGGCCAGCTTTTTCTTTTTTTTTTTATTTTGTTAA | | |
| | | TAACAGGGAGGAGATGTAGTCTCCCCTCCCCTAGCCTGAAACCTGCTTGCTCGGGGTGGAGCTTCCTGCT | | |
| | | CATTCGTTCTGCCACGCCCACTGCTGGAACCTGAGGAGCCACACACGTGCACCTTTCTACTGGACCAGAG | | |
| | | ATTATTCGGCGGGAATCGGGTCCCCTCCCCCTTCCTTCATAACTGGTGTCGCAACAATAAAATTTGAGCCT | | |
| | | TGATCAGAGTAACTGTCTTGGCTACATTTCTTCTTTTGCCCCGTCTAGATTCCTCTCTTACAGCTCGAGCGG | | |
| | | CCTTCTCAGTCGAACCGTTCACGTTGCGAGCTGCTGGCGGCCGCAACAGGGGATCCAGACATGATAAGAT | | |
| | | ACATTGATGAGTTTGGACAAACCACAACTAGAATGCAGTGAAAAAAATGCTTTATTTGTGAAATTTGTGA | | |
| | | TGCTATTGCTTTATTTGTAACCATTATAAGCTGCAATAAACAAGTTAACAACAACAATTGCATTCATTTTAT | | |
| | | GTTTCAGGTTCAGGGGGAGGTGTGGGAGGTTTTTTCGGATCCTCTAGAGTCGACCTGCAGGCATGCAAG | | |
| | | CTTGGCGTAATCATGGTCATAGCTGTTTCCTGTGTGAAATTGTTATCCGCTCACAATTCCACACAACATACG | | |
| | | AGCCGGAAGCATAAAGTGTAAAGCCTGGGGTGCCTAATGAGTGAGCTAACTCACATTAATTGCGTTGCG | | |
| | | CTCACTGCCCGCTTTCCAGTCGGGAAACCTGTCGTGCCAGCTGCATTAATGAATCGGCCAACGCGCGGGG | | |
| | | AGAGGCGGTTTGCGTATTGGGCGCTCTTCCGCTTCCTCGCTCACTGACTCGCTGCGCTCGGTCGTTCGGCT | | |
| | | GCGGCGAGCGGTATCAGCTCACTCAAAGGCGGTAATACGGTTATCCACAGAATCAGGGGATAACGCAGG | | |
| | | AAAGAACATGTGAGCAAAAGGCCAGCAAAAGGCCAGGAACCGTAAAAAGGCCGCGTTGCTGGCGTTTTT | | |
| | | CCATAGGCTCCGCCCCCCTGACGAGCATCACAAAAATCGACGCTCAAGTCAGAGGTGGCGAAACCCGAC | | |
| | | AGGACTATAAAGATACCAGGCGTTTCCCCCTGGAAGCTCCCTCGTGCGCTCTCCTGTTCCGACCCTGCCGC | | |
| | | TTACCGGATACCTGTCCGCCTTTCTCCCTTCGGGAAGCGTGGCGCTTTCTCATAGCTCACGCTGTAGGTAT | | |
| | | CTCAGTTCGGTGTAGGTCGTTCGCTCCAAGCTGGGCTGTGTGCACGAACCCCCCGTTCAGCCCGACCGCT | | |
| | | GCGCCTTATCCGGTAACTATCGTCTTGAGTCCAACCCGGTAAGACACGACTTATCGCCACTGGCAGCAGC | | |
| | | CACTGGTAACAGGATTAGCAGAGCGAGGTATGTAGGCGGTGCTACAGAGTTCTTGAAGTGGTGGCCTAA | | |
| | | CTACGGCTACACTAGAAGGACAGTATTTGGTATCTGCGCTCTGCTGAAGCCAGTTACCTTCGGAAAAAGA | | |
| | | GTTGGTAGCTCTTGATCCGGCAAACAAACCACCGCTGGTAGCGGTGGTTTTTTTGTTTGCAAGCAGCAGA | | |
| | | TTACGCGCAGAAAAAAAGGATCTCAAGAAGATCCTTTGATCTTTTCTACGGGGTCTGACGCTCAGTGGAA | | |
| | | CGAAAACTCACGTTAAGGGATTTTGGTCATGAGATTATCAAAAAGGATCTTCACCTAGATCCTTTTAAATT | | |
| | | AAAAATGAAGTTTTAAATCAATCTAAAGTATATATGAGTAAACTTGGTCTGACAGTTACCAATGCTTAATC | | |
| | | AGTGAGGCACCTATCTCAGCGATCTGTCTATTTCGTTCATCCATAGTTGCCTGACTCCCCGTCGTGTAGATA | | |
| | | ACTACGATACGGGAGGGCTTACCATCTGGCCCCAGTGCTGCAATGATACCGCGAGACCCACGCTCACCGG | | |
| | | CTCCAGATTTATCAGCAATAAACCAGCCAGCCGGAAGGGCCGAGCGCAGAAGTGGTCCTGCAACTTTATC | | |
| | | CGCCTCCATCCAGTCTATTAATTGTTGCCGGGAAGCTAGAGTAAGTAGTTCGCCAGTTAATAGTTTGCGCA | | |
| | | ACGTTGTTGCCATTGCTACAGGCATCGTGGTGTCACGCTCGTCGTTTGGTATGGCTTCATTCAGCTCCGGT | | |
| | | TCCCAACGATCAAGGCGAGTTACATGATCCCCCATGTTGTGCAAAAAAGCGGTTAGCTCCTTCGGTCCTCC | | |
| | | GATCGTTGTCAGAAGTAAGTTGGCCGCAGTGTTATCACTCATGGTTATGGCAGCACTGCATAATTCTCTTA | | |
| | | CTGTCATGCCATCCGTAAGATGCTTTTCTGTGACTGGTGAGTACTCAACCAAGTCATTCTGAGAATAGTGT | | |
| | | ATGCGGCGACCGAGTTGCTCTTGCCCGGCGTCAATACGGGATAATACCGCGCCACATAGCAGAACTTTAA | | |
| | | AAGTGCTCATCATTGGAAAACGTTCTTCGGGGCGAAAACTCTCAAGGATCTTACCGCTGTTGAGATCCAG | | |
| | | TTCGATGTAACCCACTCGTGCACCCAACTGATCTTCAGCATCTTTTACTTTCACCAGCGTTTCTGGGTGAGC | | |
| | | AAAAACAGGAAGGCAAAATGCCGCAAAAAAGGGAATAAGGGCGACACGGAAATGTTGAATACTCATAC | | |
| | | TCTTCCTTTTTCAATATTATTGAAGCATTTATCAGGGTTATTGTCTCATGAGCGGATACATATTTGAATGTA | | |
| | | TTTAGAAAAATAAACAAATAGGGGTTCCGCGCACATTTCCCCGAAAAGTGCCACCTGACGTCTAAGAAAC | | |
| | | CATTATTATCATGACATTAACCTATAAAAATAGGCGTATCACGAGGCCCTTTCGTCTCGCGCGTTTCGGTG | | |
| | | ATGACGGTGAAAACCTCTGACACATGCAGCTCCCGGAGACGGTCACAGCTTGTCTGTAAGCGGATGCCG | | |
| | | GGAGCAGACAAGCCCGTCAGGGCGCGTCAGCGGGTGTTGGCGGGTGTCGGGGCTGGCTTAACTATGCG | | |
| | | GCATCAGAGCAGATTGTACTGAGAGTGCACCATATGCGGTGTGAAATACCGCACAGATGCGTAAGGAGA | | |
| | | AAATACCGCATCAGGCGCCATTCGCCATTCAGGCTGCGCAACTGTTGGGAAGGGCGATCGGTGCGGGCC | | |
| | | TCTTCGCTATTACGCCAGCTGGCGAAAGGGGGATGTGCTGCAAGGCGATTAAGTTGGGTAACGCCAGGG | | |
| | | TTTTCCCAGTCACGACGTTGTAAAACGACGGCCAGT | | |
| TEMPLATE_pCMV | PLV10069 | GAATTCGAGCTTGCATGCCTGCAGGTCGTTACATAACTTACGGTAAATGGCCCGCCTGGCTGACCGCCCA | 346 | N/A |
| R-U5-ETnII- | | ACGACCCCCGCCCATTGACGTCAATAATGACGTATGTTCCCATAGTAACGCCAATAGGGACTTTCCATTGA | | |
| B3_EF1-GFPai- | | CGTCAATGGGTGGAGTATTTACGGTAAACTGCCCACTTGGCAGTACATCAAGTGTATCATATGCCAAGTA | | |
| LTR_v1 | | CGCCCCCTATTGACGTCAATGACGGTAAATGGCCCGCCTGGCATTATGCCCAGTACATGACCTTATGGGA | | |
| | | CTTTCCTACTTGGCAGTACATCTACGTATTAGTCATCGCTATTACCATGGTGATGCGGTTTTGGCAGTACAT | | |
| | | CAATGGGCGTGGATAGCGGTTTGACTCACGGGGATTTCCAAGTCTCCACCCCATTGACGTCAATGGGAGT | | |
| | | TTGTTTTGGCACCAAAATCAACGGGACTTTCCAAAATGTCGTAACAACTCCGCCCCATTGACGCAAATGGG | | |
| | | CGGTAGGCGTGTACGGTGGGAGGTCTATATAAGCAGAGCTCGTTTAGTGAACCGTCAGCCTTGATCAGA | | |
| | | GTAACTGTCTTGGCTACATTTCTTCTTTTGCCCCGTCTAGATTCCTCTCTTACAGCTCGAGCGGCCTTCTCAG | | |
| | | TCGAACCGTTCACGTTGCGAGCTGCTGGCGGCCGCAACATTTTGGCGCCCGAACAGGGACCTGAAGAAT | | |
| | | GGCAGAGAGATGCTAAGAGGAACGCTGCATTGGAGCTCCACAGGAAAGGATCTTCGTATCGGACATCGG | | |
| | | AGCAACGGACAAGTACACATGCTAGCGCTAGCTTAAAATTTCAGTTTTGTAAAGTGTTGCTGAGGATGCG | | |
| | | GTAGGATACGAATTAAGCTTGAATCAGTGCTAACCCAACGCTGGTTCTGCTTGGGTCAGCAGCGTGTTAA | | |
| | | TCGGAACTAGAAACGGAAACAGGCAGGTTAGCCGCAGCTTTTTAGGAAGCTGCTTAGGTGAAAGAAGAA | | |
| | | AGGGTTTAAAGTCATGGATCAGGCGGTAGGCCGTAGCTCTCCGAAGCTACATGAGGTGTGAGAAAAGAA | | |
| | | AGGGTTTATTAAAAGGAATAGGCGGATTGCCCCAGTTAATAAAAAATACATCATAAGGGAGGAAAATGT | | |
| | | CCCAAAAAGCAGAGAGAAATATCTCTCTGGGCCTTATAGCAGGAGTACTCTGTTCCCCTTTGTGTCTTGTC | | |
| | | TAATGTCCGGTGCACCAATCTGTTCTCGTGTTCGATTCATGTATGTTCGTGTCCAGTCTGTATGAATGAAT | | |
| | | GTTCTATGTTTTGTGTTGGATAATAAAGATGGTATAAAAAACTTTATCTGCAAAGCCGAGAGCTGCCACGT | | |
| | | GTTTCAGCCAGGAATCAGACACGTGGCGAGAGGGCCCCTGCTGGAAAAACTGTTCGTTTTAGAAAATAA | | |
| | | GGGCGAGTGCACAGCCTCTAAGTTTCAGAGTAAAAAAGCTAATAAATGGTTCATGATTAATGTGTTTGAC | | |
| | | AATGGTAAAGTGTTTTTTATTTTATGATTGTAGCTACAAAAATTATTATTCTCTGATTGGTCTAAATGTAAC | | |
| | | TGCTTCATTTGGTTCTTTTTTATTGGTAATGTGCTCTAAGTGTTTTCACAATCAGCTCATAAGTTGTTGGTTA | | |
| | | AGATTAATAATTGTTACATTGCTACAGATGGTTAGTGTTAAATTTGATAACTCAAGTTTAGAGTCCTTCCAA | | |
| | | CACATGGCATAAGGCAGCCCAAGAGGCTGGGTCTCTAAAGATATTTCTAGTTTAGGTAATAATTAATATG | | |
| | | GTTCGTATCCTAAATAGTAAAATTTAAAATAAGATTTAAAGCAATGTCTCTTTATTAAAGCATTAAAGCTTG | | |
| | | CTTTAATAGGTATTCATAGGTATTAATTGACATCCAAACTTCGTAATACGATAGTAATGCTTCTAATATTGA | | |
| | | TTTTAAAGATAATAAATTGTTTTAAACTTGGGTTTTGCTTTCCCAAGGTTATAGGTATTATCCTAACCTTGC | | |
| | | ACAAAAAACTTAAAAATTATGGTTAAAACTGCTATTGTTCCATTGACTGCAGCTTGCAGTTTGATTTCAAAT | | |
| | | TTAAGATCTTTAATTCACCTGTATACTGTAATTAAGATAATTACAAGAGTAATCATCTTATGAGAGCGCTCA | | |
| | | TACAGCTCACTTCATACAAAACTGTGACAGAGTTATCTAGTTATGTTTGTCTTTGTGAATAGATTAGACAA | | |
| | | ACAGTTTGGTTATAGTTGCTGCCTGGCAGGAAACTGTAGTACAGGCAATTTTTTCACAACACTAAAGTTGT | | |
| | | GAAGAACGTTTTAACTGTAAGTCATCTTAAGAAAGAGTATCAAAATTTAGAGGCGTAGACAGTTATATTG | | |
| | | TTTCTCTAAAATCGGTCCTTATTACAGGAGGGCCAGGATGCTCAGATTAAAAAGTATTTTACGTTTGAGTC | | |
| | | AATGCAGGGCTCTGGGCAGCCCCAGAGCGGCTTGTGGCCTTTCTTTTGTTTTGCAAACAGTGCCTGAGAA | | |
| | | AGATTTTTCCCTGTGTTCAAGAAAAATTCTTTTTAACAGTGTTGCAGATCTATTCAGATGTTTAAAATAATG | | |
| | | CTTAAATTCAAAGAGTTTTGCTTCTAGTGAACTGTAATCACTAGAAAATTTTGCCTCTAGGTATGGCTAAT | | |
| | | GTAACTTTACATTATGTAAGAAAAATTTTATTGTTTCTGCTTCTATACAAGAAGCCAAGAGTTTTAATCTTT | | |
| | | CAGTGTATATTGTTTCCTAAGTGAAAAGTATTTTATTAACTAATGCTTCTTAAAGTTTACCTTAAATCCTTGC | | |
| | | TCTCACCCAAAAGATTCAGAGACAATATCCTTTTATTACTTAGGGTTTTAGTTTACTACAAAAGTTTCTACA | | |
| | | AAAAATAAAGCTTTTATAATTGTTATTAATTGGTAATTAAAAATTGGTTGTGCCCAAAACAATTCTTTGGCC | | |
| | | AAAAAAAAAAACATTATTGTAAAGTCATTTTTCTCATCCTCCCAGCCAATCGTTGGCCCACGTGGGCCCAA | | |
| | | CTAGCTTCTGTGGGGCAGAGTCTTAAGACACAGTTTCCCCTGTTCCAGCACAGATGATCTAGTTGTGTGCT | | |
| | | GTAGATGGTGTTTTAAAATGCTGAACAATCAAACCTTAATTTGTATATTAATAGTCAATGCCATATCTCTGA | | |
| | | GCTCACAATTGCTTAAATTGTTCATCCCTCAGATACTATTAATTCTCAAATTTACAATTGCTTATGCATATTT | | |
| | | CTAGTTAATAAATAAATTATGCACATGTGACTCTTAATAACTTTACAAGCCTTCTAGTTACAACTGCTCCTT | | |
| | | AAGAAAATTGATTAAAAGTGCAATTAGTCACTGCCCCTTTACAGCCAAGTATTTAAAATGTTTTGTCAACT | | |
| | | AGTTATTAATTCAAAAGTTTAGGTATTGTAAAATTTTAAAACTTTAACTTCTTAAAAGACAAAAAAGAGAG | | |
| | | AAATTGTATCCCCGTGCATGCTATTTAGTgaacaaacgacccaacacccgtgcgttttattctgtctttttattgccgatccccc | | |
| | | ggccgctttacttgtacagctcgtccatgccgagagtgatcccggcggcggtcacgaactccagcaggaccatgtgatcgcgcttctcgttg | | |
| | | gggtctttgctcagggcggactgggtgctcaggtaagtatcaaggttacaagacaggtttaaggagaccaatagaaactgggcttgtcga | | |
| | | gacagagaagactcttgcgtttctgataggcacctattggtcttactgacatccactttgcctttctctccacaggtagtggttgtcgggca | | |
| | | gcagcacggggccgtcgccgatgggggtgttctgctggtagtggtcggcgagctgcacgctgccgtcctcgatgttgtggcggatcttgaag | | |
| | | ttcaccttgatgccgttcttctgcttgtcggccatgatatagacgttgtggctgttgtagttgtactccagcttgtgccccaggatgttgcc | | |
| | | gtcctccttgaagtcgatgcccttcagctcgatgcggttcaccagggtgtcgccctcgaacttcacctcggcgcgggtcttgtagttgccgt | | |
| | | cgtccttgaagaagatggtgcgctcctggacgtagccttcgggcatggcggacttgaagaagtcgtgctgcttcatgtggtcggggtagcgg | | |
| | | ctgaagcactgcacgccgtaggtcagggtggtcacgagggtgggccagggcacgggcagcttgccggtggtgcagatgaacttcagggtcag | | |
| | | cttgccgtaggtggcatcgccctcgccctcgccggacacgctgaacttgtggccgtttacgtcgccgtccagctcgaccaggatgggcacca | | |
| | | ccccggtgaacagctcctcgcccttgctcaccatggtggctttaccaacagtaccggaatgccaagcttgggtcctgtgttctggcggcaaa | | |
| | | cccgttgcgaaaaagaacgttcacggcgactactgcacttatatacggttctcccccaccctcgggaaaaaggcggagccagtacacgacat | | |
| | | cactttcccagtttaccccgcgccaccttctctaggcaccggatcaattgccgacccctccccccaacttctcggggactgtgggcgatgtg | | |
| | | cgctctgcccGCATTCCCATGCACACTATTAAAGTCTTACCTTTATTTTCAAAATCTAATATTTTAATGTCAAAGA | | |
| | | GTTTAATAAATGCTTTATAGTATCTTAAAGGGATCTACTTATTGGCTTATAGATTAATCCTAAAACAGCTAC | | |
| | | CTTATTAAAAAAGGGAAAAACAGGTTTTCTCCACAGAACGCTGCAGAAGCATATTAATAAATTCGTGTGA | | |
| | | CGAGCTGGTAGGTAAGTTGACTCATGTCCTGATTAAATTGACTAAAAAACTAAATTAAATTCATGTTTTAG | | |
| | | ATCCATCCTTACTTGTCATTTTTCCAGTTTAGACTAGCTTCTAGCCTTTTAACTTTATGACAATAGTACATCA | | |
| | | GAGACTGTATATTCAGACTTAGTAAAATTAGTCATTTAATAGAGTCATAATGATTTTTCTCCTTTCTTCAGT | | |
| | | GTGACCAGCCATTCTAACTCAATCTTAGACTGGTCCTAATATTCAGTCCAATGTTAGAGATTCCTATATTCT | | |
| | | AAATTACCTAGCAAGTTAATTAAAGAGCAATTGGTCACTTAATACCCCCTGACTAACAAATGGAAGGGTC | | |
| | | CAGATCCAGTTCTAATTTGGGGTAGGGACTCAGTTTGTGTTTTTTCACGAGATGAAGATGGAGCGCGGTG | | |
| | | GCTGCCAGAGAGATTAATTCGTCAGATGAACACAGATTCTGACTCTTCTGGTAAGTATCATTCTAAAGACT | | |
| | | AAAATTCCTTTTGTGCTTAAAATTCAGCTGAGAGCAACAGCTCTCAAAGGTGTTCTCCAGCTACTCTCTGA | | |
| | | ACCAGCTCCCGACAGGAGGCCGGAGACTAGCCTCAGCTTTACAATTTGCATTTGAATAAAGTACCTAGAC | | |
| | | TTCCCGGAAAGAAGTTCTGCTTTCCTACTTTCTCACTGTCTTTCAAGATTTTGTCTTTCAAGCAGGTAAATC | | |
| | | AACATTCCCGAGGCGGACCAGTAGATGTGCATCCCCGCCCCCCTAGAGCACACAGGTGGCAGCTGTTACC | | |
| | | CCCAGTCTCAGGACATTTCCAGCATGTGGCTTTCAGTCTGAGTTAAAAATTTAGGTTTACCTAGAGGGCTA | | |
| | | GAAGAGTAGATTTTTCTATATTAATAAAGATTGGTTTTTATTTTGATAGACAGGCTTAGCCCCTTAGCTGAC | | |
| | | CTCTGGCTTTTCACCCTTGCTGTTACTGCAAGGTGTCCTTAGCTCAATAGGCTGTGGAAAAAACAGGGATG | | |
| | | AGGAGGAACGACTTCCAGCTCCTATTTTACCCACAAATCGTGGTGTTATTAACGACATAATTCTTGCTTAG | | |
| | | GCTTTGCTAATTCTGAGGTTGATAATTCTCCTTTAGGAGCTGCACAGCACTCAGAACTGTGCATACTGGTT | | |
| | | TGTGATTGTACAAATTCAGTATGGGCACCGCTTGGTGCAGAGATACTTACTGCAAGGGAAGGTCCGGCTT | | |
| | | GACCATTTCTGAGTTTCCTGTGAGATAAACCCGGTTTGAAAGAGGTTGGTACCAAATTTTGGTTAAAAATA | | |
| | | AAAAATATTCTCCGGCTCTACCTCGCCTCCCCAAAAGGTACCAAGAGCCACATGTGTGGGTTTTACCCACG | | |
| | | GGAGGAATCGGGTCCATGTCCACCCAAGCCAAGGTTAAAAGCCCACTCATCTACGGATGAGAAAATCATT | | |
| | | TGATCACCTCAGTTAAGCGTTGCCTTATTTAACTTAATTAATAGGGGGGAGAGAGATTGGAGACGTACTA | | |
| | | TTGAAAGGGCAAGCCCTTCACTGCCTCCCACCCAAATAAAAAGGCCAATTGGCCTTGTACTACAAGAGCC | | |
| | | GGTCACTCCTTCTCCCTGTTTCCCACCTATCTTCCAAAAATGCTAAGGAATTCAACTTAGTGTTATTTTCACA | | |
| | | TCGTTCAGTCAAACTTAGCCAGAGTTCCAAACGCCCTACTTAAAATTCAACTAGAAAGTTACCTACCAAGT | | |
| | | ACTAATTAGCATTATAAAGTCAGAGTCTGCAGCTCCAGGCCTTTCAGTTGTTTACTAGAAAGGACAGTCTT | | |
| | | AAGCCAGATACAGTTTACCATAAGAAAAGTTAAAGATTCCCAGTGAAGCAAGTTTTTTCTTTAGCCCTAGA | | |
| | | TTCCAGGCAGAACTATTGAGCATAGATAATTTTCCCCCCTCAGGCCAGCTTTTTCTTTTTTTTTTTATTTTGT | | |
| | | TAATAACAGGGAGGAGATGTAGTCTCCCCTCCCCTAGCCTGAAACCTGCTTGCTCGGGGTGGAGCTTCCT | | |
| | | GCTCATTCGTTCTGCCACGCCCACTGCTGGAACCTGAGGAGCCACACACGTGCACCTTTCTACTGGACCAG | | |
| | | AGATTATTCGGCGGGAATCGGGTCCCCTCCCCCTTCCTTCATAACTGGTGTCGCAACAATAAAATTTGAGC | | |
| | | CTTGATCAGAGTAACTGTCTTGGCTACATTTCTTCTTTTGCCCCGTCTAGATTCCTCTCTTACAGCTCGAGC | | |
| | | GGCCTTCTCAGTCGAACCGTTCACGTTGCGAGCTGCTGGCGGCCGCAACAGGGGATCCAGACATGATAA | | |
| | | GATACATTGATGAGTTTGGACAAACCACAACTAGAATGCAGTGAAAAAAATGCTTTATTTGTGAAATTTG | | |
| | | TGATGCTATTGCTTTATTTGTAACCATTATAAGCTGCAATAAACAAGTTAACAACAACAATTGCATTCATTT | | |
| | | TATGTTTCAGGTTCAGGGGGAGGTGTGGGAGGTTTTTTCGGATCCTCTAGAGTCGACCTGCAGGCATGCA | | |
| | | AGCTTGGCGTAATCATGGTCATAGCTGTTTCCTGTGTGAAATTGTTATCCGCTCACAATTCCACACAACAT | | |
| | | ACGAGCCGGAAGCATAAAGTGTAAAGCCTGGGGTGCCTAATGAGTGAGCTAACTCACATTAATTGCGTT | | |
| | | GCGCTCACTGCCCGCTTTCCAGTCGGGAAACCTGTCGTGCCAGCTGCATTAATGAATCGGCCAACGCGCG | | |
| | | GGGAGAGGCGGTTTGCGTATTGGGCGCTCTTCCGCTTCCTCGCTCACTGACTCGCTGCGCTCGGTCGTTC | | |
| | | GGCTGCGGCGAGCGGTATCAGCTCACTCAAAGGCGGTAATACGGTTATCCACAGAATCAGGGGATAACG | | |
| | | CAGGAAAGAACATGTGAGCAAAAGGCCAGCAAAAGGCCAGGAACCGTAAAAAGGCCGCGTTGCTGGCG | | |
| | | TTTTTCCATAGGCTCCGCCCCCCTGACGAGCATCACAAAAATCGACGCTCAAGTCAGAGGTGGCGAAACC | | |
| | | CGACAGGACTATAAAGATACCAGGCGTTTCCCCCTGGAAGCTCCCTCGTGCGCTCTCCTGTTCCGACCCTG | | |
| | | CCGCTTACCGGATACCTGTCCGCCTTTCTCCCTTCGGGAAGCGTGGCGCTTTCTCATAGCTCACGCTGTAG | | |
| | | GTATCTCAGTTCGGTGTAGGTCGTTCGCTCCAAGCTGGGCTGTGTGCACGAACCCCCCGTTCAGCCCGAC | | |
| | | CGCTGCGCCTTATCCGGTAACTATCGTCTTGAGTCCAACCCGGTAAGACACGACTTATCGCCACTGGCAGC | | |
| | | AGCCACTGGTAACAGGATTAGCAGAGCGAGGTATGTAGGCGGTGCTACAGAGTTCTTGAAGTGGTGGCC | | |
| | | TAACTACGGCTACACTAGAAGGACAGTATTTGGTATCTGCGCTCTGCTGAAGCCAGTTACCTTCGGAAAA | | |
| | | AGAGTTGGTAGCTCTTGATCCGGCAAACAAACCACCGCTGGTAGCGGTGGTTTTTTTGTTTGCAAGCAGC | | |
| | | AGATTACGCGCAGAAAAAAAGGATCTCAAGAAGATCCTTTGATCTTTTCTACGGGGTCTGACGCTCAGTG | | |
| | | GAACGAAAACTCACGTTAAGGGATTTTGGTCATGAGATTATCAAAAAGGATCTTCACCTAGATCCTTTTAA | | |
| | | ATTAAAAATGAAGTTTTAAATCAATCTAAAGTATATATGAGTAAACTTGGTCTGACAGTTACCAATGCTTA | | |
| | | ATCAGTGAGGCACCTATCTCAGCGATCTGTCTATTTCGTTCATCCATAGTTGCCTGACTCCCCGTCGTGTAG | | |
| | | ATAACTACGATACGGGAGGGCTTACCATCTGGCCCCAGTGCTGCAATGATACCGCGAGACCCACGCTCAC | | |
| | | CGGCTCCAGATTTATCAGCAATAAACCAGCCAGCCGGAAGGGCCGAGCGCAGAAGTGGTCCTGCAACTT | | |
| | | TATCCGCCTCCATCCAGTCTATTAATTGTTGCCGGGAAGCTAGAGTAAGTAGTTCGCCAGTTAATAGTTTG | | |
| | | CGCAACGTTGTTGCCATTGCTACAGGCATCGTGGTGTCACGCTCGTCGTTTGGTATGGCTTCATTCAGCTC | | |
| | | CGGTTCCCAACGATCAAGGCGAGTTACATGATCCCCCATGTTGTGCAAAAAAGCGGTTAGCTCCTTCGGT | | |
| | | CCTCCGATCGTTGTCAGAAGTAAGTTGGCCGCAGTGTTATCACTCATGGTTATGGCAGCACTGCATAATTC | | |
| | | TCTTACTGTCATGCCATCCGTAAGATGCTTTTCTGTGACTGGTGAGTACTCAACCAAGTCATTCTGAGAAT | | |
| | | AGTGTATGCGGCGACCGAGTTGCTCTTGCCCGGCGTCAATACGGGATAATACCGCGCCACATAGCAGAA | | |
| | | CTTTAAAAGTGCTCATCATTGGAAAACGTTCTTCGGGGCGAAAACTCTCAAGGATCTTACCGCTGTTGAGA | | |
| | | TCCAGTTCGATGTAACCCACTCGTGCACCCAACTGATCTTCAGCATCTTTTACTTTCACCAGCGTTTCTGGG | | |
| | | TGAGCAAAAACAGGAAGGCAAAATGCCGCAAAAAAGGGAATAAGGGCGACACGGAAATGTTGAATACT | | |
| | | CATACTCTTCCTTTTTCAATATTATTGAAGCATTTATCAGGGTTATTGTCTCATGAGCGGATACATATTTGA | | |
| | | ATGTATTTAGAAAAATAAACAAATAGGGGTTCCGCGCACATTTCCCCGAAAAGTGCCACCTGACGTCTAA | | |
| | | GAAACCATTATTATCATGACATTAACCTATAAAAATAGGCGTATCACGAGGCCCTTTCGTCTCGCGCGTTT | | |
| | | CGGTGATGACGGTGAAAACCTCTGACACATGCAGCTCCCGGAGACGGTCACAGCTTGTCTGTAAGCGGA | | |
| | | TGCCGGGAGCAGACAAGCCCGTCAGGGCGCGTCAGCGGGTGTTGGCGGGTGTCGGGGCTGGCTTAACT | | |
| | | ATGCGGCATCAGAGCAGATTGTACTGAGAGTGCACCATATGCGGTGTGAAATACCGCACAGATGCGTAA | | |
| | | GGAGAAAATACCGCATCAGGCGCCATTCGCCATTCAGGCTGCGCAACTGTTGGGAAGGGCGATCGGTGC | | |
| | | GGGCCTCTTCGCTATTACGCCAGCTGGCGAAAGGGGGATGTGCTGCAAGGCGATTAAGTTGGGTAACGC | | |
| | | CAGGGTTTTCCCAGTCACGACGTTGTAAAACGACGGCCAGT | | |
| TEMPLATE_pCMV_ | PLV10070 | GAATTCGAGCTTGCATGCCTGCAGGTCGTTACATAACTTACGGTAAATGGCCCGCCTGGCTGACCGCCCA | 346 | N/A |
| R-U5-ETnII- | | ACGACCCCCGCCCATTGACGTCAATAATGACGTATGTTCCCATAGTAACGCCAATAGGGACTTTCCATTGA | | |
| B3_EF1-GFPai- | | CGTCAATGGGTGGAGTATTTACGGTAAACTGCCCACTTGGCAGTACATCAAGTGTATCATATGCCAAGTA | | |
| LTR_v2 | | CGCCCCCTATTGACGTCAATGACGGTAAATGGCCCGCCTGGCATTATGCCCAGTACATGACCTTATGGGA | | |
| | | CTTTCCTACTTGGCAGTACATCTACGTATTAGTCATCGCTATTACCATGGTGATGCGGTTTTGGCAGTACAT | | |
| | | CAATGGGCGTGGATAGCGGTTTGACTCACGGGGATTTCCAAGTCTCCACCCCATTGACGTCAATGGGAGT | | |
| | | TTGTTTTGGCACCAAAATCAACGGGACTTTCCAAAATGTCGTAACAACTCCGCCCCATTGACGCAAATGGG | | |
| | | CGGTAGGCGTGTACGGTGGGAGGTCTATATAAGCAGAGCTCGTTTAGTGAACCGTCAGCCTTGATCAGA | | |
| | | GTAACTGTCTTGGCTACATTTCTTCTTTTGCCCCGTCTAGATTCCTCTCTTACAGCTCGAGCGGCCTTCTCAG | | |
| | | TCGAACCGTTCACGTTGCGAGCTGCTGGCGGCCGCAACATTTTGGCGCCCGAACAGGGACCTGAAGAAT | | |
| | | GGCAGAGAGATGCTAAGAGGAACGCTGCATTGGAGCTCCACAGGAAAGGATCTTCGTATCGGACATCGG | | |
| | | AGCAACGGACAAGTACACATGCTAGCGCTAGCTTAAAATTTCAGTTTTGTAAAGTGTTGCTGAGGATGCG | | |
| | | GTAGGATACGAATTAAGCTTGAATCAGTGCTAACCCAACGCTGGTTCTGCTTGGGTCAGCAGCGTGTTAA | | |
| | | TCGGAACTAGAAACGGAAACAGGCAGGTTAGCCGCAGCTTTTTAGGAAGCTGCTTAGGTGAAAGAAGAA | | |
| | | AGGGTTTAAAGTCATGGATCAGGCGGTAGGCCGTAGCTCTCCGAAGCTACATGAGGTGTGAGAAAAGAA | | |
| | | AGGGTTTATTAAAAGGAATAGGCGGATTGCCCCAGTTAATAAAAAATACATCATAAGGGAGGAAAATGT | | |
| | | CCCAAAAAGCAGAGAGAAATATCTCTCTGGGCCTTATAGCAGGAGTACTCTGTTCCCCTTTGTGTCTTGTC | | |
| | | TAATGTCCGGTGCACCAATCTGTTCTCGTGTTCGATTCATGTATGTTCGTGTCCAGTCTGTATGAATGAAT | | |
| | | GTTCTATGTTTTGTGTTGGATAATAAAGATGGTATAAAAAACTTTATCTGCAAAGCCGAGAGCTGCCACGT | | |
| | | GTTTCAGCCAGGAATCAGACACGTGGCGAGAGGGCCCCTGCTGGAAAAACTGTTCGTTTTAGAAAATAA | | |
| | | GGGCGAGTGCACAGCCTCTAAGTTTCAGAGTAAAAAAGCTAATAAATGGTTCATGATTAATGTGTTTGAC | | |
| | | AATGGTAAAGTGTTTTTTATTTTATGATTGTAGCTACAAAAATTATTATTCTCTGATTGGTCTAAATGTAAC | | |
| | | TGCTTCATTTGGTTCTTTTTTATTGGTAATGTGCTCTAAGTGTTTTCACAATCAGCTCATAAGTTGTTGGTTA | | |
| | | AGATTAATAATTGTTACATTGCTACAGATGGTTAGTGTTAAATTTGATAACTCAAGTTTAGAGTCCTTCCAA | | |
| | | CACATGGCATAAGGCAGCCCAAGAGGCTGGGTCTCTAAAGATATTTCTAGTTTAGGTAATAATTAATATG | | |
| | | GTTCGTATCCTAAATAGTAAAATTTAAAATAAGATTTAAAGCAATGTCTCTTTATTAAAGCATTAAAGCTTG | | |
| | | CTTTAATAGGTATTCATAGGTATTAATTGACATCCAAACTTCGTAATACGATAGTAATGCTTCTAATATTGA | | |
| | | TTTTAAAGATAATAAATTGTTTTAAACTTGGGTTTTGCTTTCCCAAGGTTATAGGTATTATCCTAACCTTGC | | |
| | | ACAAAAAACTTAAAAATTATGGTTAAAACTGCTATTGTTCCATTGACTGCAGCTTGCAGTTTGATTTCAAAT | | |
| | | TTAAGATCTTTAATTCACCTGTATACTGTAATTAAGATAATTACAAGAGTAATCATCTTATGAGAGCGCTCA | | |
| | | TACAGCTCACTTCATACAAAACTGTGACAGAGTTATCTAGTTATGTTTGTCTTTGTGAATAGATTAGACAA | | |
| | | ACAGTTTGGTTATAGTTGCTGCCTGGCAGGAAACTGTAGTACAGGCAATTTTTTCACAACACTAAAGTTGT | | |
| | | GAAGAACGTTTTAACTGTAAGTCATCTTAAGAAAGAGTATCAAAATTTAGAGGCGTAGACAGTTATATTG | | |
| | | TTTCTCTAAAATCGGTCCTTATTACAGGAGGGCCAGGATGCTCAGATTAAAAAGTATTTTACGTTTGAGTC | | |
| | | AATGCAGGGCTCTGGGCAGCCCCAGAGCGGCTTGTGGCCTTTCTTTTGTTTTGCAAACAGTGCCTGAGAA | | |
| | | AGATTTTTCCCTGTGTTCAAGAAAAATTCTTTTTAACAGTGTTGCAGATCTATTCAGATGTTTAAAATAATG | | |
| | | CTTAAATTCAAAGAGTTTTGCTTCTAGTGAACTGTAATCACTAGAAAATTTTGCCTCTAGGTATGGCTAAT | | |
| | | GTAACTTTACATTATGTAAGAAAAATTTTATTGTTTCTGCTTCTATACAAGAAGCCAAGAGTTTTAATCTTT | | |
| | | CAGTGTATATTGTTTCCTAAGTGAAAAGTATTTTATTAACTAATGCTTCTTAAAGTTTACCTTAAATCCTTGC | | |
| | | TCTCACCCAAAAGATTCAGAGACAATATCCTTTTATTACTTAGGGTTTTAGTTTACTACAAAAGTTTCTACA | | |
| | | AAAAATAAAGCTTTTATAATTGTTATTAATTGGTAATTAAAAATTGGTTGTGCCCAAAACAATTCTTTGGCC | | |
| | | AAAAAAAAAAACATTATTGTAAAGTCATTTTTCTCATCCTCCCAGCCAATCGTTGGCCCACGTGGGCCCAA | | |
| | | CTAGCTTCTGTGGGGCAGAGTCTTAAGACACAGTTTCCCCTGTTCCAGCACAGATGATCTAGTTGTGTGCT | | |
| | | GTAGATGGTGTTTTAAAATGCTGAACAATCAAACCTTAATTTGTATATTAATAGTCAATGCCATATCTCTGA | | |
| | | GCTCACAATTGCTTAAATTGTTCATCCCTCAGATACTATTAATTCTCAAATTTACAATTGCTTATGCATATTT | | |
| | | CTAGTTAATAAATAAATTATGCACATGTGACTCTTAATAACTTTACAAGCCTTCTAGTTACAACTGCTCCTT | | |
| | | AAGAAAATTGATTAAAAGTGCAATTAGTCACTGCCCCTTTACAGCCAAGTATTTAAAATGTTTTGTCAACT | | |
| | | AGTTATTAATTCAAAAGTTTAGGTATTGTAAAATTTTAAAACTTTAACTTCTTAAAAGACAAAAAAGAGAG | | |
| | | AAATTGTATCCCCGTGCATGCTATTTAGTgaacaaacgacccaacacccgtgcgttttattctgtctttttattgccgatccccc | | |
| | | ggccgctttacttgtacagctcgtccatgccgagagtgatcccggcggcggtcacgaactccagcaggaccatgtgatcgcgcttctcgttg | | |
| | | gggtctttgctcagggcggactgggtgctcaggtaagtatcaaggttacaagacaggtttaaggagaccaatagaaactgggcttgtcga | | |
| | | gacagagaagactcttgcgtttctgataggcacctattggtcttactgacatccactttgcctttctctccacaggtagtggttgtcgggca | | |
| | | gcagcacggggccgtcgccgatgggggtgttctgctggtagtggtcggcgagctgcacgctgccgtcctcgatgttgtggcggatcttgaag | | |
| | | ttcaccttgatgccgttcttctgcttgtcggccatgatatagacgttgtggctgttgtagttgtactccagcttgtgccccaggatgttgcc | | |
| | | gtcctccttgaagtcgatgcccttcagctcgatgcggttcaccagggtgtcgccctcgaacttcacctcggcgcgggtcttgtagttgccgt | | |
| | | cgtccttgaagaagatggtgcgctcctggacgtagccttcgggcatggcggacttgaagaagtcgtgctgcttcatgtggtcggggtagcgg | | |
| | | ctgaagcactgcacgccgtaggtcagggtggtcacgagggtgggccagggcacgggcagcttgccggtggtgcagatgaacttcagggtcag | | |
| | | cttgccgtaggtggcatcgccctcgccctcgccggacacgctgaacttgtggccgtttacgtcgccgtccagctcgaccaggatgggcacca | | |
| | | ccccggtgaacagctcctcgcccttgctcaccatggtggctttaccaacagtaccggaatgccaagcttgggtcctgtgttctggggcaaac | | |
| | | ccgttgcgaaaaagaacgttcacggcgactactgcacttatatacggttctcccccaccctcgggaaaaaggcggagccagtacacgacatc | | |
| | | actttcccagtttaccccgcgccaccttctctaggcaccggatcaattgccgacccctccccccaacttctcggggactgtgggcgatgtgc | | |
| | | gctctgcccGCATTCCCATGCACACTATTAAAGTCTTACCTTTATTTTCAAAATCTAATATTTTAATGTCAAAGA | | |
| | | GTTTAATAAATGCTTTATAGTATCTTAAAGGGATCTACTTATTGGCTTATAGATTAATCCTAAAACAGCTAC | | |
| | | CTTATTAAAAAAGGGAAAAACAGGTTTTCTCCACAGAACGCTGCAGAAGCATATTAATAAATTCGTGTGA | | |
| | | CGAGCTGGTAGGTAAGTTGACTCATGTCCTGATTAAATTGACTAAAAAACTAAATTAAATTCATGTTTTAG | | |
| | | ATCCATCCTTACTTGTCATTTTTCCAGTTTAGACTAGCTTCTAGCCTTTTAACTTTATGACAATAGTACATCA | | |
| | | GAGACTGTATATTCAGACTTAGTAAAATTAGTCATTTAATAGAGTCATAATGATTTTTCTCCTTTCTTCAGT | | |
| | | GTGACCAGCCATTCTAACTCAATCTTAGACTGGTCCTAATATTCAGTCCAATGTTAGAGATTCCTATATTCT | | |
| | | AAATTACCTAGCAAGTTAATTAAAGAGCAATTGGTCACTTAATACCCCCTGACTAACAAATGGAAGGGTC | | |
| | | CAGATCCAGTTCTAATTTGGGGTAGGGACTCAGTTTGTGTTTTTTCACGAGATGAAGATGGAGCGCGGTG | | |
| | | GCTGCCAGAGAGATTAATTCGTCAGATGAACACAGATTCTGACTCTTCTGGTAAGTATCATTCTAAAGACT | | |
| | | AAAATTCCTTTTGTGCTTAAAATTCAGCTGAGAGCAACAGCTCTCAAAGGTGTTCTCCAGCTACTCTCTGA | | |
| | | ACCAGCTCCCGACAGGAGGCCGGAGACTAGCCTCAGCTTTACAATTTGCATTTGAATAAAGTACCTAGAC | | |
| | | TTCCCGGAAAGAAGTTCTGCTTTCCTACTTTCTCACTGTCTTTCAAGATTTTGTCTTTCAAGCAGGTAAATC | | |
| | | AACATTCCCGAGGCGGACCAGTAGATGTGCATCCCCGCCCCCCTAGAGCACACAGGTGGCAGCTGTTACC | | |
| | | CCCAGTCTCAGGACATTTCCAGCATGTGGCTTTCAGTCTGAGTTAAAAATTTAGGTTTACCTAGAGGGCTA | | |
| | | GAAGAGTAGATTTTTCTATATTAATAAAGATTGGTTTTTATTTTGATAGACAGGCTTAGCCCCTTAGCTGAC | | |
| | | CTCTGGCTTTTCACCCTTGCTGTTACTGCAAGGTGTCCTTAGCTCAATAGGCTGTGGAAAAAACAGGGATG | | |
| | | AGGAGGAACGACTTCCAGCTCCTATTTTACCCACAAATCGTGGTGTTATTAACGACATAATTCTTGCTTAG | | |
| | | GCTTTGCTAATTCTGAGGTTGATAATTCTCCTTTAGGAGCTGCACAGCACTCAGAACTGTGCATACTGGTT | | |
| | | TGTGATTGTACAAATTCAGTATGGGCACCGCTTGGTGCAGAGATACTTACTGCAAGGGAAGGTCCGGCTT | | |
| | | GACCATTTCTGAGTTTCCTGTGAGATAAACCCGGTTTGAAAGAGGTTGGTACCAAATTTTGGTTAAAAATA | | |
| | | AAAAATATTCTCCGGCTCTACCTCGCCTCCCCAAAAGGTACCAAGAGCCACATGTGTGGGTTTTACCCACG | | |
| | | GGAGGAATCGGGTCCATGTCCACCCAAGCCAAGGTTAAAAGCCCACTCATCTACGGATGAGAAAATCATT | | |
| | | TGATCACCTCAGTTAAGCGTTGCCTTATTTAACTTAATTAATAGGGGGGAGAGAGATTGGAGACGTACTA | | |
| | | TTGAAAGGGCAAGCCCTTCACTGCCTCCCACCCAAATAAAAAGGCCAATTGGCCTTGTACTACAAGAGCC | | |
| | | GGTCACTCCTTCTCCCTGTTTCCCACCTATCTTCCAAAAATGCTAAGGAATTCAACTTAGTGTTATTTTCACA | | |
| | | TCGTTCAGTCAAACTTAGCCAGAGTTCCAAACGCCCTACTTAAAATTCAACTAGAAAGTTACCTACCAAGT | | |
| | | ACTAATTAGCATTATAAAGTCAGAGTCTGCAGCTCCAGGCCTTTCAGTTGTTTACTAGAAAGGACAGTCTT | | |
| | | AAGCCAGATACAGTTTACCATAAGAAAAGTTAAAGATTCCCAGTGAAGCAAGTTTTTTCTTTAGCCCTAGA | | |
| | | TTCCAGGCAGAACTATTGAGCATAGATAATTTTCCCCCCTCAGGCCAGCTTTTTCTTTTTTTTTTTATTTTGT | | |
| | | TAATAACAGGGAGGAGATGTAGTCTCCCCTCCCCTAGCCTGAAACCTGCTTGCTCGGGGTGGAGCTTCCT | | |
| | | GCTCATTCGTTCTGCCACGCCCACTGCTGGAACCTGAGGAGCCACACACGTGCACCTTTCTACTGGACCAG | | |
| | | AGATTATTCGGCGGGAATCGGGTCCCCTCCCCCTTCCTTCATAACTGGTGTCGCAACAATAAAATTTGAGC | | |
| | | CTTGATCAGAGTAACTGTCTTGGCTACATTTCTTCTTTTGCCCCGTCTAGATTCCTCTCTTACAGCTCGAGC | | |
| | | GGCCTTCTCAGTCGAACCGTTCACGTTGCGAGCTGCTGGCGGCCGCAACAGGGGATCCAGACATGATAA | | |
| | | GATACATTGATGAGTTTGGACAAACCACAACTAGAATGCAGTGAAAAAAATGCTTTATTTGTGAAATTTG | | |
| | | TGATGCTATTGCTTTATTTGTAACCATTATAAGCTGCAATAAACAAGTTAACAACAACAATTGCATTCATTT | | |
| | | TATGTTTCAGGTTCAGGGGGAGGTGTGGGAGGTTTTTTCGGATCCTCTAGAGTCGACCTGCAGGCATGCA | | |
| | | AGCTTGGCGTAATCATGGTCATAGCTGTTTCCTGTGTGAAATTGTTATCCGCTCACAATTCCACACAACAT | | |
| | | ACGAGCCGGAAGCATAAAGTGTAAAGCCTGGGGTGCCTAATGAGTGAGCTAACTCACATTAATTGCGTT | | |
| | | GCGCTCACTGCCCGCTTTCCAGTCGGGAAACCTGTCGTGCCAGCTGCATTAATGAATCGGCCAACGCGCG | | |
| | | GGGAGAGGCGGTTTGCGTATTGGGCGCTCTTCCGCTTCCTCGCTCACTGACTCGCTGCGCTCGGTCGTTC | | |
| | | GGCTGCGGCGAGCGGTATCAGCTCACTCAAAGGCGGTAATACGGTTATCCACAGAATCAGGGGATAACG | | |
| | | CAGGAAAGAACATGTGAGCAAAAGGCCAGCAAAAGGCCAGGAACCGTAAAAAGGCCGCGTTGCTGGCG | | |
| | | TTTTTCCATAGGCTCCGCCCCCCTGACGAGCATCACAAAAATCGACGCTCAAGTCAGAGGTGGCGAAACC | | |
| | | CGACAGGACTATAAAGATACCAGGCGTTTCCCCCTGGAAGCTCCCTCGTGCGCTCTCCTGTTCCGACCCTG | | |
| | | CCGCTTACCGGATACCTGTCCGCCTTTCTCCCTTCGGGAAGCGTGGCGCTTTCTCATAGCTCACGCTGTAG | | |
| | | GTATCTCAGTTCGGTGTAGGTCGTTCGCTCCAAGCTGGGCTGTGTGCACGAACCCCCCGTTCAGCCCGAC | | |
| | | CGCTGCGCCTTATCCGGTAACTATCGTCTTGAGTCCAACCCGGTAAGACACGACTTATCGCCACTGGCAGC | | |
| | | AGCCACTGGTAACAGGATTAGCAGAGCGAGGTATGTAGGCGGTGCTACAGAGTTCTTGAAGTGGTGGCC | | |
| | | TAACTACGGCTACACTAGAAGGACAGTATTTGGTATCTGCGCTCTGCTGAAGCCAGTTACCTTCGGAAAA | | |
| | | AGAGTTGGTAGCTCTTGATCCGGCAAACAAACCACCGCTGGTAGCGGTGGTTTTTTTGTTTGCAAGCAGC | | |
| | | AGATTACGCGCAGAAAAAAAGGATCTCAAGAAGATCCTTTGATCTTTTCTACGGGGTCTGACGCTCAGTG | | |
| | | GAACGAAAACTCACGTTAAGGGATTTTGGTCATGAGATTATCAAAAAGGATCTTCACCTAGATCCTTTTAA | | |
| | | ATTAAAAATGAAGTTTTAAATCAATCTAAAGTATATATGAGTAAACTTGGTCTGACAGTTACCAATGCTTA | | |
| | | ATCAGTGAGGCACCTATCTCAGCGATCTGTCTATTTCGTTCATCCATAGTTGCCTGACTCCCCGTCGTGTAG | | |
| | | ATAACTACGATACGGGAGGGCTTACCATCTGGCCCCAGTGCTGCAATGATACCGCGAGACCCACGCTCAC | | |
| | | CGGCTCCAGATTTATCAGCAATAAACCAGCCAGCCGGAAGGGCCGAGCGCAGAAGTGGTCCTGCAACTT | | |
| | | TATCCGCCTCCATCCAGTCTATTAATTGTTGCCGGGAAGCTAGAGTAAGTAGTTCGCCAGTTAATAGTTTG | | |
| | | CGCAACGTTGTTGCCATTGCTACAGGCATCGTGGTGTCACGCTCGTCGTTTGGTATGGCTTCATTCAGCTC | | |
| | | CGGTTCCCAACGATCAAGGCGAGTTACATGATCCCCCATGTTGTGCAAAAAAGCGGTTAGCTCCTTCGGT | | |
| | | CCTCCGATCGTTGTCAGAAGTAAGTTGGCCGCAGTGTTATCACTCATGGTTATGGCAGCACTGCATAATTC | | |
| | | TCTTACTGTCATGCCATCCGTAAGATGCTTTTCTGTGACTGGTGAGTACTCAACCAAGTCATTCTGAGAAT | | |
| | | AGTGTATGCGGCGACCGAGTTGCTCTTGCCCGGCGTCAATACGGGATAATACCGCGCCACATAGCAGAA | | |
| | | CTTTAAAAGTGCTCATCATTGGAAAACGTTCTTCGGGGCGAAAACTCTCAAGGATCTTACCGCTGTTGAGA | | |
| | | TCCAGTTCGATGTAACCCACTCGTGCACCCAACTGATCTTCAGCATCTTTTACTTTCACCAGCGTTTCTGGG | | |
| | | TGAGCAAAAACAGGAAGGCAAAATGCCGCAAAAAAGGGAATAAGGGCGACACGGAAATGTTGAATACT | | |
| | | CATACTCTTCCTTTTTCAATATTATTGAAGCATTTATCAGGGTTATTGTCTCATGAGCGGATACATATTTGA | | |
| | | ATGTATTTAGAAAAATAAACAAATAGGGGTTCCGCGCACATTTCCCCGAAAAGTGCCACCTGACGTCTAA | | |
| | | GAAACCATTATTATCATGACATTAACCTATAAAAATAGGCGTATCACGAGGCCCTTTCGTCTCGCGCGTTT | | |
| | | CGGTGATGACGGTGAAAACCTCTGACACATGCAGCTCCCGGAGACGGTCACAGCTTGTCTGTAAGCGGA | | |
| | | TGCCGGGAGCAGACAAGCCCGTCAGGGCGCGTCAGCGGGTGTTGGCGGGTGTCGGGGCTGGCTTAACT | | |
| | | ATGCGGCATCAGAGCAGATTGTACTGAGAGTGCACCATATGCGGTGTGAAATACCGCACAGATGCGTAA | | |
| | | GGAGAAAATACCGCATCAGGCGCCATTCGCCATTCAGGCTGCGCAACTGTTGGGAAGGGCGATCGGTGC | | |
| | | GGGCCTCTTCGCTATTACGCCAGCTGGCGAAAGGGGGATGTGCTGCAAGGCGATTAAGTTGGGTAACGC | | |
| | | CAGGGTTTTCCCAGTCACGACGTTGTAAAACGACGGCCAGT | | |
| TEMPLATE_pCMV_ | PLV10071 | GAATTCGAGCTTGCATGCCTGCAGGTCGTTACATAACTTACGGTAAATGGCCCGCCTGGCTGACCGCCCA | 347 | N/A |
| R-U5-ETnII- | | ACGACCCCCGCCCATTGACGTCAATAATGACGTATGTTCCCATAGTAACGCCAATAGGGACTTTCCATTGA | | |
| B3_EF1-GFPai- | | CGTCAATGGGTGGAGTATTTACGGTAAACTGCCCACTTGGCAGTACATCAAGTGTATCATATGCCAAGTA | | |
| LTR_v3 | | CGCCCCCTATTGACGTCAATGACGGTAAATGGCCCGCCTGGCATTATGCCCAGTACATGACCTTATGGGA | | |
| | | CTTTCCTACTTGGCAGTACATCTACGTATTAGTCATCGCTATTACCATGGTGATGCGGTTTTGGCAGTACAT | | |
| | | CAATGGGCGTGGATAGCGGTTTGACTCACGGGGATTTCCAAGTCTCCACCCCATTGACGTCAATGGGAGT | | |
| | | TTGTTTTGGCACCAAAATCAACGGGACTTTCCAAAATGTCGTAACAACTCCGCCCCATTGACGCAAATGGG | | |
| | | CGGTAGGCGTGTACGGTGGGAGGTCTATATAAGCAGAGCTGAGCCTTGATCAGAGTAACTGTCTTGGCT | | |
| | | ACATTTCTTCTTTTGCCCCGTCTAGATTCCTCTCTTACAGCTCGAGCGGCCTTCTCAGTCGAACCGTTCACG | | |
| | | TTGCGAGCTGCTGGCGGCCGCAACATTTTGGCGCCCGAACAGGGACCTGAAGAATGGCAGAGAGATGCT | | |
| | | AAGAGGAACGCTGCATTGGAGCTCCACAGGAAAGGATCTTCGTATCGGACATCGGAGCAACGGACAAGT | | |
| | | ACACATGCTAGCGCTAGCTTAAAATTTCAGTTTTGTAAAGTGTTGCTGAGGATGCGGTAGGATACGAATT | | |
| | | AAGCTTGAATCAGTGCTAACCCAACGCTGGTTCTGCTTGGGTCAGCAGCGTGTTAATCGGAACTAGAAAC | | |
| | | GGAAACAGGCAGGTTAGCCGCAGCTTTTTAGGAAGCTGCTTAGGTGAAAGAAGAAAGGGTTTAAAGTCA | | |
| | | TGGATCAGGCGGTAGGCCGTAGCTCTCCGAAGCTACATGAGGTGTGAGAAAAGAAAGGGTTTATTAAAA | | |
| | | GGAATAGGCGGATTGCCCCAGTTAATAAAAAATACATCATAAGGGAGGAAAATGTCCCAAAAAGCAGAG | | |
| | | AGAAATATCTCTCTGGGCCTTATAGCAGGAGTACTCTGTTCCCCTTTGTGTCTTGTCTAATGTCCGGTGCAC | | |
| | | CAATCTGTTCTCGTGTTCGATTCATGTATGTTCGTGTCCAGTCTGTATGAATGAATGTTCTATGTTTTGTGT | | |
| | | TGGATAATAAAGATGGTATAAAAAACTTTATCTGCAAAGCCGAGAGCTGCCACGTGTTTCAGCCAGGAAT | | |
| | | CAGACACGTGGCGAGAGGGCCCCTGCTGGAAAAACTGTTCGTTTTAGAAAATAAGGGCGAGTGCACAGC | | |
| | | CTCTAAGTTTCAGAGTAAAAAAGCTAATAAATGGTTCATGATTAATGTGTTTGACAATGGTAAAGTGTTTT | | |
| | | TTATTTTATGATTGTAGCTACAAAAATTATTATTCTCTGATTGGTCTAAATGTAACTGCTTCATTTGGTTCTT | | |
| | | TTTTATTGGTAATGTGCTCTAAGTGTTTTCACAATCAGCTCATAAGTTGTTGGTTAAGATTAATAATTGTTA | | |
| | | CATTGCTACAGATGGTTAGTGTTAAATTTGATAACTCAAGTTTAGAGTCCTTCCAACACATGGCATAAGGC | | |
| | | AGCCCAAGAGGCTGGGTCTCTAAAGATATTTCTAGTTTAGGTAATAATTAATATGGTTCGTATCCTAAATA | | |
| | | GTAAAATTTAAAATAAGATTTAAAGCAATGTCTCTTTATTAAAGCATTAAAGCTTGCTTTAATAGGTATTCA | | |
| | | TAGGTATTAATTGACATCCAAACTTCGTAATACGATAGTAATGCTTCTAATATTGATTTTAAAGATAATAAA | | |
| | | TTGTTTTAAACTTGGGTTTTGCTTTCCCAAGGTTATAGGTATTATCCTAACCTTGCACAAAAAACTTAAAAA | | |
| | | TTATGGTTAAAACTGCTATTGTTCCATTGACTGCAGCTTGCAGTTTGATTTCAAATTTAAGATCTTTAATTC | | |
| | | ACCTGTATACTGTAATTAAGATAATTACAAGAGTAATCATCTTATGAGAGCGCTCATACAGCTCACTTCAT | | |
| | | ACAAAACTGTGACAGAGTTATCTAGTTATGTTTGTCTTTGTGAATAGATTAGACAAACAGTTTGGTTATAG | | |
| | | TTGCTGCCTGGCAGGAAACTGTAGTACAGGCAATTTTTTCACAACACTAAAGTTGTGAAGAACGTTTTAAC | | |
| | | TGTAAGTCATCTTAAGAAAGAGTATCAAAATTTAGAGGCGTAGACAGTTATATTGTTTCTCTAAAATCGGT | | |
| | | CCTTATTACAGGAGGGCCAGGATGCTCAGATTAAAAAGTATTTTACGTTTGAGTCAATGCAGGGCTCTGG | | |
| | | GCAGCCCCAGAGCGGCTTGTGGCCTTTCTTTTGTTTTGCAAACAGTGCCTGAGAAAGATTTTTCCCTGTGT | | |
| | | TCAAGAAAAATTCTTTTTAACAGTGTTGCAGATCTATTCAGATGTTTAAAATAATGCTTAAATTCAAAGAG | | |
| | | TTTTGCTTCTAGTGAACTGTAATCACTAGAAAATTTTGCCTCTAGGTATGGCTAATGTAACTTTACATTATG | | |
| | | TAAGAAAAATTTTATTGTTTCTGCTTCTATACAAGAAGCCAAGAGTTTTAATCTTTCAGTGTATATTGTTTC | | |
| | | CTAAGTGAAAAGTATTTTATTAACTAATGCTTCTTAAAGTTTACCTTAAATCCTTGCTCTCACCCAAAAGAT | | |
| | | TCAGAGACAATATCCTTTTATTACTTAGGGTTTTAGTTTACTACAAAAGTTTCTACAAAAAATAAAGCTTTT | | |
| | | ATAATTGTTATTAATTGGTAATTAAAAATTGGTTGTGCCCAAAACAATTCTTTGGCCAAAAAAAAAAACAT | | |
| | | TATTGTAAAGTCATTTTTCTCATCCTCCCAGCCAATCGTTGGCCCACGTGGGCCCAACTAGCTTCTGTGGG | | |
| | | GCAGAGTCTTAAGACACAGTTTCCCCTGTTCCAGCACAGATGATCTAGTTGTGTGCTGTAGATGGTGTTTT | | |
| | | AAAATGCTGAACAATCAAACCTTAATTTGTATATTAATAGTCAATGCCATATCTCTGAGCTCACAATTGCTT | | |
| | | AAATTGTTCATCCCTCAGATACTATTAATTCTCAAATTTACAATTGCTTATGCATATTTCTAGTTAATAAATA | | |
| | | AATTATGCACATGTGACTCTTAATAACTTTACAAGCCTTCTAGTTACAACTGCTCCTTAAGAAAATTGATTA | | |
| | | AAAGTGCAATTAGTCACTGCCCCTTTACAGCCAAGTATTTAAAATGTTTTGTCAACTAGTTATTAATTCAAA | | |
| | | AGTTTAGGTATTGTAAAATTTTAAAACTTTAACTTCTTAAAAGACAAAAAAGAGAGAAATTGTATCCCCGT | | |
| | | GCATGCTATTTAGTgaacaaacgacccaacacccgtgcgttttattctgtctttttattgccgatcccccggccgctttacttgtacagc | | |
| | | tcgtccatgccgagagtgatcccggcggcggtcacgaactccagcaggaccatgtgatcgcgcttctcgttggggtctttgctcagggcgga | | |
| | | ctgggtgctcaggtaagtatcaaggttacaagacaggtttaaggagaccaatagaaactgggcttgtcgagacagagaagactcttgcgt | | |
| | | ttctgataggcacctattggtcttactgacatccactttgcctttctctccacaggtagtggttgtcgggcagcagcacggggccgtcgccg | | |
| | | atgggggtgttctgctggtagtggtcggcgagctgcacgctgccgtcctcgatgttgtggcggatcttgaagttcaccttgatgccgttctt | | |
| | | ctgcttgtcggccatgatatagacgttgtggctgttgtagttgtactccagcttgtgccccaggatgttgccgtcctccttgaagtcgatgc | | |
| | | ccttcagctcgatgcggttcaccagggtgtcgccctcgaacttcacctcggcgcgggtcttgtagttgccgtcgtccttgaagaagatggtg | | |
| | | cgctcctggacgtagccttcgggcatggcggacttgaagaagtcgtgctgcttcatgtggtcggggtagcggctgaagcactgcacgccgta | | |
| | | ggtcagggtggtcacgaggggggccagggcacgggcagcttgccggtggtgcagatgaacttcagggtcagcttgccgtaggtggcatcgcc | | |
| | | ctcgccctcgccggacacgctgaacttgtggccgtttacgtcgccgtccagctcgaccaggatgggcaccaccccggtgaacagctcctcgc | | |
| | | ccttgctcaccatggtggctttaccaacagtaccggaatgccaagcttgggtcctgtgttctggcggcaaacccgttgcgaaaaagaacgtt | | |
| | | cacggcgactactgcacttatatacggttctcccccaccctcgggaaaaaggcggagccagtacacgacatcactttcccagtttaccccgc | | |
| | | gccaccttctctaggcaccggatcaattgccgacccctccccccaacttctcggggactgtgggcgatgtgcgctctgcccGCATTCCCAT | | |
| | | GCACACTATTAAAGTCTTACCTTTATTTTCAAAATCTAATATTTTAATGTCAAAGAGTTTAATAAATGCTTTA | | |
| | | TAGTATCTTAAAGGGATCTACTTATTGGCTTATAGATTAATCCTAAAACAGCTACCTTATTAAAAAAGGGA | | |
| | | AAAACAGGTTTTCTCCACAGAACGCTGCAGAAGCATATTAATAAATTCGTGTGACGAGCTGGTAGGTAAG | | |
| | | TTGACTCATGTCCTGATTAAATTGACTAAAAAACTAAATTAAATTCATGTTTTAGATCCATCCTTACTTGTC | | |
| | | ATTTTTCCAGTTTAGACTAGCTTCTAGCCTTTTAACTTTATGACAATAGTACATCAGAGACTGTATATTCAG | | |
| | | ACTTAGTAAAATTAGTCATTTAATAGAGTCATAATGATTTTTCTCCTTTCTTCAGTGTGACCAGCCATTCTA | | |
| | | ACTCAATCTTAGACTGGTCCTAATATTCAGTCCAATGTTAGAGATTCCTATATTCTAAATTACCTAGCAAGT | | |
| | | TAATTAAAGAGCAATTGGTCACTTAATACCCCCTGACTAACAAATGGAAGGGTCCAGATCCAGTTCTAATT | | |
| | | TGGGGTAGGGACTCAGTTTGTGTTTTTTCACGAGATGAAGATGGAGCGCGGTGGCTGCCAGAGAGATTA | | |
| | | ATTCGTCAGATGAACACAGATTCTGACTCTTCTGGTAAGTATCATTCTAAAGACTAAAATTCCTTTTGTGCT | | |
| | | TAAAATTCAGCTGAGAGCAACAGCTCTCAAAGGTGTTCTCCAGCTACTCTCTGAACCAGCTCCCGACAGG | | |
| | | AGGCCGGAGACTAGCCTCAGCTTTACAATTTGCATTTGAATAAAGTACCTAGACTTCCCGGAAAGAAGTT | | |
| | | CTGCTTTCCTACTTTCTCACTGTCTTTCAAGATTTTGTCTTTCAAGCAGGTAAATCAACATTCCCGAGGCGG | | |
| | | ACCAGTAGATGTGCATCCCCGCCCCCCTAGAGCACACAGGTGGCAGCTGTTACCCCCAGTCTCAGGACAT | | |
| | | TTCCAGCATGTGGCTTTCAGTCTGAGTTAAAAATTTAGGTTTACCTAGAGGGCTAGAAGAGTAGATTTTTC | | |
| | | TATATTAATAAAGATTGGTTTTTATTTTGATAGACAGGCTTAGCCCCTTAGCTGACCTCTGGCTTTTCACCC | | |
| | | TTGCTGTTACTGCAAGGTGTCCTTAGCTCAATAGGCTGTGGAAAAAACAGGGATGAGGAGGAACGACTT | | |
| | | CCAGCTCCTATTTTACCCACAAATCGTGGTGTTATTAACGACATAATTCTTGCTTAGGCTTTGCTAATTCTG | | |
| | | AGGTTGATAATTCTCCTTTAGGAGCTGCACAGCACTCAGAACTGTGCATACTGGTTTGTGATTGTACAAAT | | |
| | | TCAGTATGGGCACCGCTTGGTGCAGAGATACTTACTGCAAGGGAAGGTCCGGCTTGACCATTTCTGAGTT | | |
| | | TCCTGTGAGATAAACCCGGTTTGAAAGAGGTTGGTACCAAATTTTGGTTAAAAATAAAAAATATTCTCCG | | |
| | | GCTCTACCTCGCCTCCCCAAAAGGTACCAAGAGCCACATGTGTGGGTTTTACCCACGGGAGGAATCGGGT | | |
| | | CCATGTCCACCCAAGCCAAGGTTAAAAGCCCACTCATCTACGGATGAGAAAATCATTTGATCACCTCAGTT | | |
| | | AAGCGTTGCCTTATTTAACTTAATTAATAGGGGGGAGAGAGATTGGAGACGTACTATTGAAAGGGCAAG | | |
| | | CCCTTCACTGCCTCCCACCCAAATAAAAAGGCCAATTGGCCTTGTACTACAAGAGCCGGTCACTCCTTCTC | | |
| | | CCTGTTTCCCACCTATCTTCCAAAAATGCTAAGGAATTCAACTTAGTGTTATTTTCACATCGTTCAGTCAAA | | |
| | | CTTAGCCAGAGTTCCAAACGCCCTACTTAAAATTCAACTAGAAAGTTACCTACCAAGTACTAATTAGCATT | | |
| | | ATAAAGTCAGAGTCTGCAGCTCCAGGCCTTTCAGTTGTTTACTAGAAAGGACAGTCTTAAGCCAGATACA | | |
| | | GTTTACCATAAGAAAAGTTAAAGATTCCCAGTGAAGCAAGTTTTTTCTTTAGCCCTAGATTCCAGGCAGAA | | |
| | | CTATTGAGCATAGATAATTTTCCCCCCTCAGGCCAGCTTTTTCTTTTTTTTTTTATTTTGTTAATAACAGGGA | | |
| | | GGAGATGTAGTCTCCCCTCCCCTAGCCTGAAACCTGCTTGCTCGGGGTGGAGCTTCCTGCTCATTCGTTCT | | |
| | | GCCACGCCCACTGCTGGAACCTGAGGAGCCACACACGTGCACCTTTCTACTGGACCAGAGATTATTCGGC | | |
| | | GGGAATCGGGTCCCCTCCCCCTTCCTTCATAACTGGTGTCGCAACAATAAAATTTGAGCCTTGATCAGAGT | | |
| | | AACTGTCTTGGCTACATTTCTTCTTTTGCCCCGTCTAGATTCCTCTCTTACAGCTCGAGCGGCCTTCTCAGTC | | |
| | | GAACCGTTCACGTTGCGAGCTGCTGGCGGCCGCAACAGGGGATCCAGACATGATAAGATACATTGATGA | | |
| | | GTTTGGACAAACCACAACTAGAATGCAGTGAAAAAAATGCTTTATTTGTGAAATTTGTGATGCTATTGCTT | | |
| | | TATTTGTAACCATTATAAGCTGCAATAAACAAGTTAACAACAACAATTGCATTCATTTTATGTTTCAGGTTC | | |
| | | AGGGGGAGGTGTGGGAGGTTTTTTCGGATCCTCTAGAGTCGACCTGCAGGCATGCAAGCTTGGCGTAAT | | |
| | | CATGGTCATAGCTGTTTCCTGTGTGAAATTGTTATCCGCTCACAATTCCACACAACATACGAGCCGGAAGC | | |
| | | ATAAAGTGTAAAGCCTGGGGTGCCTAATGAGTGAGCTAACTCACATTAATTGCGTTGCGCTCACTGCCCG | | |
| | | CTTTCCAGTCGGGAAACCTGTCGTGCCAGCTGCATTAATGAATCGGCCAACGCGCGGGGAGAGGCGGTT | | |
| | | TGCGTATTGGGCGCTCTTCCGCTTCCTCGCTCACTGACTCGCTGCGCTCGGTCGTTCGGCTGCGGCGAGCG | | |
| | | GTATCAGCTCACTCAAAGGCGGTAATACGGTTATCCACAGAATCAGGGGATAACGCAGGAAAGAACATG | | |
| | | TGAGCAAAAGGCCAGCAAAAGGCCAGGAACCGTAAAAAGGCCGCGTTGCTGGCGTTTTTCCATAGGCTC | | |
| | | CGCCCCCCTGACGAGCATCACAAAAATCGACGCTCAAGTCAGAGGTGGCGAAACCCGACAGGACTATAA | | |
| | | AGATACCAGGCGTTTCCCCCTGGAAGCTCCCTCGTGCGCTCTCCTGTTCCGACCCTGCCGCTTACCGGATA | | |
| | | CCTGTCCGCCTTTCTCCCTTCGGGAAGCGTGGCGCTTTCTCATAGCTCACGCTGTAGGTATCTCAGTTCGG | | |
| | | TGTAGGTCGTTCGCTCCAAGCTGGGCTGTGTGCACGAACCCCCCGTTCAGCCCGACCGCTGCGCCTTATCC | | |
| | | GGTAACTATCGTCTTGAGTCCAACCCGGTAAGACACGACTTATCGCCACTGGCAGCAGCCACTGGTAACA | | |
| | | GGATTAGCAGAGCGAGGTATGTAGGCGGTGCTACAGAGTTCTTGAAGTGGTGGCCTAACTACGGCTACA | | |
| | | CTAGAAGGACAGTATTTGGTATCTGCGCTCTGCTGAAGCCAGTTACCTTCGGAAAAAGAGTTGGTAGCTC | | |
| | | TTGATCCGGCAAACAAACCACCGCTGGTAGCGGTGGTTTTTTTGTTTGCAAGCAGCAGATTACGCGCAGA | | |
| | | AAAAAAGGATCTCAAGAAGATCCTTTGATCTTTTCTACGGGGTCTGACGCTCAGTGGAACGAAAACTCAC | | |
| | | GTTAAGGGATTTTGGTCATGAGATTATCAAAAAGGATCTTCACCTAGATCCTTTTAAATTAAAAATGAAGT | | |
| | | TTTAAATCAATCTAAAGTATATATGAGTAAACTTGGTCTGACAGTTACCAATGCTTAATCAGTGAGGCACC | | |
| | | TATCTCAGCGATCTGTCTATTTCGTTCATCCATAGTTGCCTGACTCCCCGTCGTGTAGATAACTACGATACG | | |
| | | GGAGGGCTTACCATCTGGCCCCAGTGCTGCAATGATACCGCGAGACCCACGCTCACCGGCTCCAGATTTA | | |
| | | TCAGCAATAAACCAGCCAGCCGGAAGGGCCGAGCGCAGAAGTGGTCCTGCAACTTTATCCGCCTCCATCC | | |
| | | AGTCTATTAATTGTTGCCGGGAAGCTAGAGTAAGTAGTTCGCCAGTTAATAGTTTGCGCAACGTTGTTGCC | | |
| | | ATTGCTACAGGCATCGTGGTGTCACGCTCGTCGTTTGGTATGGCTTCATTCAGCTCCGGTTCCCAACGATC | | |
| | | AAGGCGAGTTACATGATCCCCCATGTTGTGCAAAAAAGCGGTTAGCTCCTTCGGTCCTCCGATCGTTGTCA | | |
| | | GAAGTAAGTTGGCCGCAGTGTTATCACTCATGGTTATGGCAGCACTGCATAATTCTCTTACTGTCATGCCA | | |
| | | TCCGTAAGATGCTTTTCTGTGACTGGTGAGTACTCAACCAAGTCATTCTGAGAATAGTGTATGCGGCGACC | | |
| | | GAGTTGCTCTTGCCCGGCGTCAATACGGGATAATACCGCGCCACATAGCAGAACTTTAAAAGTGCTCATC | | |
| | | ATTGGAAAACGTTCTTCGGGGCGAAAACTCTCAAGGATCTTACCGCTGTTGAGATCCAGTTCGATGTAAC | | |
| | | CCACTCGTGCACCCAACTGATCTTCAGCATCTTTTACTTTCACCAGCGTTTCTGGGTGAGCAAAAACAGGA | | |
| | | AGGCAAAATGCCGCAAAAAAGGGAATAAGGGCGACACGGAAATGTTGAATACTCATACTCTTCCTTTTTC | | |
| | | AATATTATTGAAGCATTTATCAGGGTTATTGTCTCATGAGCGGATACATATTTGAATGTATTTAGAAAAAT | | |
| | | AAACAAATAGGGGTTCCGCGCACATTTCCCCGAAAAGTGCCACCTGACGTCTAAGAAACCATTATTATCAT | | |
| | | GACATTAACCTATAAAAATAGGCGTATCACGAGGCCCTTTCGTCTCGCGCGTTTCGGTGATGACGGTGAA | | |
| | | AACCTCTGACACATGCAGCTCCCGGAGACGGTCACAGCTTGTCTGTAAGCGGATGCCGGGAGCAGACAA | | |
| | | GCCCGTCAGGGCGCGTCAGCGGGTGTTGGCGGGTGTCGGGGCTGGCTTAACTATGCGGCATCAGAGCA | | |
| | | GATTGTACTGAGAGTGCACCATATGCGGTGTGAAATACCGCACAGATGCGTAAGGAGAAAATACCGCAT | | |
| | | CAGGCGCCATTCGCCATTCAGGCTGCGCAACTGTTGGGAAGGGCGATCGGTGCGGGCCTCTTCGCTATTA | | |
| | | CGCCAGCTGGCGAAAGGGGGATGTGCTGCAAGGCGATTAAGTTGGGTAACGCCAGGGTTTTCCCAGTCA | | |
| | | CGACGTTGTAAAACGACGGCCAGT | | |

TABLE S4
IAP LTR retrotransposon driver and template construct elements

| | | | SEQ | | SEQ |
|---|---|---|---|---|---|
| | plasmid_ | | ID | | ID |
| name | id | nucleic_acid_sequence | NO: | protein_sequence | NO: |
| IAP- | N/A | TGTTGGGAGCCGCGCCCACATTCGCCGTTACAAGATGGCGCTGACAGC | 348 | N/A | |
| 92L23 | | TGTGTTCTAAGTGGTAAACAAATAATCTGCGCATGTGCCGAGGGTGGT | | | |
| U3 | | TCTTCACTCTATGTGCTCTGCCTTCCCCGTGACGTCAACTCGGCCGATG | | | |
| | | GGCTGCAGCCAATCAGGGAGTGACACGTCCTAGGCGAAGGAGAATTC | | | |
| | | TCTTTAATAGGGACGGGGTTTT | | | |
| IAP- | N/A | GTTTTCTCTCTCTCTTGC | 349 | N/A | |
| 92L23 R | | | | | |
| (full | | | | | |
| length | | | | | |
| for CMV | | | | | |
| v2 | | | | | |
| designs) | | | | | |
| IAP- | N/A | GGGACGGGGTTTCGTTTTCTCTCTCTCTTGC | 350 | | |
| 92L23 R | | | | | |
| (5′ | | | | | |
| extended | | | | | |
| into U3 | | | | | |
| for CMV | | | | | |
| v1 | | | | | |
| designs) | | | | | |
| IAP- | N/A | TTCTCGCTCGCTCTTGCTTCTTGCACTCTGGCTCCTGAAGATGTAAGCAA | 351 | N/A | |
| 92L23 | | TAAAGTTTTGCCGCAGAAGATTCTGGTCTGTGGTGTTCTTCCTGGCCGG | | | |
| U5 | | GCGTGAGAACGCGTCTAATAACA | | | |
| IAP- | N/A | TGTTGGGAGCCGCGCCCACATTCGCCGTTACAAGATGGCGCTGACAGC | 352 | N/A | |
| 92L23 | | TGTGTTCTAAGTGGTAAACAAATAATCTGCGCATGTGCCGAGGGTGGT | | | |
| 5′/3′ LTR | | TCTTCACTCTATGTGCTCTGCCTTCCCCGTGACGTCAACTCGGCCGATG | | | |
| | | GGCTGCAGCCAATCAGGGAGTGACACGTCCTAGGCGAAGGAGAATTC | | | |
| | | TCTTTAATAGGGACGGGGTTTTGTTTTCTCTCTCTCTTGCTTCTCGCTCG | | | |
| | | CTCTTGCTTCTTGCACTCTGGCTCCTGAAGATGTAAGCAATAAAGTTTT | | | |
| | | GCCGCAGAAGATTCTGGTCTGTGGTGTTCTTCCTGGCCGGGCGTGAGA | | | |
| | | ACGCGTCTAATAACA | | | |
| IAP- | N/A | GGTGCCGAATTCCGGGA | 353 | N/A | |
| 92L23 | | | | | |
| PBS | | | | | |
| IAP- | N/A | TAGCGACTAAACACATCA | 309 | N/A | |
| 92L23 | | | | | |
| PBS* | | | | | |
| IAP- | N/A | ATGAATTCAGAACTTTTCAGCTGGGGAACGAGAGTACCAGTGAGTACA | 354 | MNSELFSWGTRVPVSTALRGKSDLELSKEIQDSLSEVKWNM | 363 |
| 92L23 | | GCTTTACGAGGTAAGTCTGATCTTGAACTTTCTAAGGAAATTCAAGACA | | FGLEFFLVLGALLFLFTCYQVIKIGLKILEEIQDKLSEVKR | |
| gag | | GTCTATCAGAAGTAAAGTGGAATATGTTTGGCCTTGAATTTTTTCTGGT | | GERVGAKRKYGTQNKYTGLSKGLEPEEKLRLGRNTWREIRR | |
| | | GTTAGGAGCCCTTTTGTTCCTTTTCACATGTTATCAAGTGATTAAGATAG | | KRGKREKKKDQLAEVSRRYSSLDELRKPALSSSEADEEFSS | |
| | | GGCTGAAAATTCTAGAGGAAATTCAGGACAAGCTATCAGAAGTAAAGC | | EETDWEEEAAHYQPANWSRKKPKAAGEGQFADWPQGSRLQG | |
| | | GGGGAGAGAGAGTAGGAGCAAAGAGAAAATATGGTACACAAAATAA | | PPYAESPPCVVRQQCAERQCAERQCADSFIPREEQRKIQQA | |
| | | GTATACAGGCCTTTCCAAGGGTCTTGAACCCGAGGAAAAGTTAAGGTT | | FPVFEGAEGGRVHAPVEYLQIKEIAESVRKYGTNANFTLVQ | |
| | | AGGTAGGAATACCTGGAGAGAGATTAGAAGAAAAAGAGGAAAAAGG | | LDRLAGMALTPADWQTVVKAALPSMGKYMEWRALWHEAAQA | |
| | | GAAAAGAAGAAAGATCAATTAGCGGAGGTCTCTAGGAGATACTCGTC | | QARANAAALTPEQRDWTFDLLTGQGAYSADQTNYHWGAYAQ | |
| | | ACTAGATGAGCTCAGGAAGCCAGCTCTTAGTAGTTCTGAAGCAGATGA | | ISSTAIRAWKALSRAGETTGQLTKIIQGPQESFSDFVARMT | |
| | | AGAATTCTCCTCTGAGGAAACAGACTGGGAGGAAGAAGCAGCCCATTA | | EAAERIFGESEQAAPLIEQLIYEQATKECRAAIAPRKNKGL | |
| | | CCAGCCAGCTAATTGGTCAAGAAAAAAGCCAAAAGCGGCTGGCGAAG | | QDWLRVCRELGGPLSNAGLAAAILQSQNRSMGRNNQRTCFN | |
| | | GCCAGTTTGCTGATTGGCCTCAGGGCAGTCGGCTTCAAGGTCCGCCCT | | CGKPGHFKKDCRAPDKQGGTLTLCSKCGKGYHRADQCRSVR | |
| | | ATGCGGAGTCCCCGCCCTGCGTAGTGCGTCAGCAATGCGCAGAGAGG | | DIKGRVLPPPDSQSADVPKNGSSGPRSQGPQRYGNRFVRTQ | |
| | | CAGTGCGCAGAGAGGCAGTGCGCAGACTCATTCATTCCCAGAGAGGA | | EAVREATQEDPQGWTCVPPPTSY* | |
| | | ACAAAGGAAAATACAACAGGCATTTCCGGTCTTTGAAGGAGCCGAGG | | | |
| | | GTGGGCGTGTCCACGCTCCGGTAGAATACTTACAAATTAAAGAAATTG | | | |
| | | CCGAGTCGGTCCGTAAATATGGAACCAATGCTAATTTTACCTTGGTGCA | | | |
| | | GTTAGACAGGCTCGCCGGCATGGCACTAACTCCTGCTGACTGGCAAAC | | | |
| | | GGTTGTAAAAGCCGCTCTCCCTAGTATGGGCAAATATATGGAATGGAG | | | |
| | | AGCGCTTTGGCACGAAGCTGCACAAGCGCAGGCCCGAGCAAACGCAG | | | |
| | | CTGCTTTGACTCCAGAGCAGAGAGATTGGACTTTTGACTTGTTAACGG | | | |
| | | GTCAGGGAGCTTATTCTGCTGATCAGACAAACTACCATTGGGGAGCTT | | | |
| | | ATGCCCAGATTTCTTCCACGGCTATTAGGGCCTGGAAGGCGCTCTCTCG | | | |
| | | AGCAGGTGAAACCACTGGTCAGTTAACAAAGATAATCCAGGGACCTCA | | | |
| | | GGAATCCTTCTCAGATTTTGTGGCCAGAATGACAGAGGCAGCAGAGCG | | | |
| | | TATTTTTGGAGAGTCAGAGCAAGCTGCGCCTCTGATAGAACAGCTAAT | | | |
| | | CTATGAGCAAGCCACAAAGGAGTGCCGAGCGGCCATAGCCCCAAGAA | | | |
| | | AGAACAAAGGCTTACAAGACTGGCTCAGGGTCTGTCGAGAGCTTGGG | | | |
| | | GGACCTCTCAGCAATGCAGGTTTAGCGGCTGCCATCCTTCAATCCCAAA | | | |
| | | ACCGCTCCATGGGCAGAAATAATCAGAGGACATGTTTTAACTGCGGAA | | | |
| | | AGCCTGGGCATTTTAAGAAAGATTGCAGAGCTCCAGATAAACAGGGA | | | |
| | | GGGACTCTCACTCTTTGCTCTAAGTGTGGCAAGGGTTATCATAGAGCTG | | | |
| | | ACCAGTGTCGCTCTGTGAGGGATATAAAGGGCAGAGTCCTTCCCCCAC | | | |
| | | CTGATAGTCAATCAGCTGATGTGCCAAAAAACGGGTCATCGGGCCCTC | | | |
| | | GGTCCCAGGGCCCTCAAAGATATGGGAACCGGTTTGTCAGGACCCAG | | | |
| | | GAAGCAGTCAGAGAGGCGACCCAGGAAGACCCACAAGGGTGGACCTG | | | |
| | | CGTGCCGCCTCCGACTTCCTACTAA | | | |
| IAP- | N/A | AATGCCTCAAATGAGTATTCAGCCGGTGCCGGTGGAGCCTATACCATC | 355 | MPQMSIQPVPVEPIPSLPPGTMGLILGRGSLTLQGLVVHPG | 364 |
| 92L23 | | CTTGCCCCCGGGAACCATGGGCCTTATTCTCGGCCGGGGTTCACTCACC | | VMDCQHSPEIQVLCSSPKGVFSISKGDRIAQLLLLPDNTRE | |
| pro | | TTGCAGGGCTTAGTAGTCCACCCTGGAGTTATGGATTGTCAACATTCCC | | KFAGPEIKKMGSSGNDSAYLVVSLNDRPKLRLKINGKEFEG | |
| | | CTGAAATACAGGTCCTGTGCTCAAGCCCTAAAGGCGTTTTTTCTATTAG | | ILDTGADKSIISTHWWPKAWPTTESSHSLQGLGYQSCPTIS | |
| | | TAAAGGAGATAGGATAGCTCAGCTGCTGCTCCTCCCTGATAATACCAG | | SIALTWESSEGQQGKFIPYVLPLPVNLWGRDIMQHLGLILS | |
| | | GGAGAAATTTGCAGGACCTGAGATAAAGAAAATGGGCTCCTCAGGAA | | NENAPSGGYSAKAKNIMAKMGYKEGKGLGHQEQGRIEPISP | |
| | | ATGATTCTGCCTATTTGGTTGTATCTTTAAATGATAGACCTAAGCTCCGC | | NGNQDRQGLGFP* | |
| | | CTTAAGATTAACGGAAAAGAGTTTGAAGGCATCCTTGATACCGGAGCA | | | |
| | | GATAAAAGTATAATTTCTACACATTGGTGGCCCAAAGCATGGCCCACCA | | | |
| | | CAGAGTCATCTCATTCATTACAGGGCCTAGGATATCAATCATGTCCCAC | | | |
| | | TATAAGCTCCATTGCCTTGACGTGGGAATCCTCTGAAGGACAGCAAGG | | | |
| | | GAAATTCATACCTTATGTGCTCCCACTCCCGGTTAACCTCTGGGGAAGG | | | |
| | | GATATTATGCAGCATTTGGGCCTTATTTTGTCCAATGAAAACGCCCCAT | | | |
| | | CAGGAGGGTATTCAGCTAAAGCAAAAAATATCATGGCAAAGATGGGTT | | | |
| | | ATAAAGAAGGAAAAGGGTTAGGACATCAAGAACAGGGAAGGATAGA | | | |
| | | GCCCATCTCACCTAATGGAAACCAAGACAGACAGGGTCTGGGTTTTCC | | | |
| | | TTAG | | | |
| IAP- | N/A | TGGAAACCAAGACAGACAGGGTCTGGGTTTTCCTTAGCGGCCATTGGG | 356 | WKPRQTGSGFSLAAIGAARPIPWKTGDPVWVPQWHLSSEKL | 365 |
| 92L23 | | GCAGCACGACCCATACCATGGAAAACAGGGGACCCAGTGTGGGTTCCT | | EAVIQLVEEQLKLGHIEPSTSPWNTPIFVIKKKSGKWRLLH | |
| pol | | CAATGGCACCTATCCTCTGAAAAACTAGAAGCTGTGATTCAACTGGTA | | DLRAINEQMNLFGPVQRGLPVLSALPRGWNLIIIDIKDCFF | |
| | | GAGGAACAATTAAAACTAGGCCATATTGAACCCTCTACCTCACCTTGGA | | SIPLCPRDRPRFAFTIPSINHMEPDKRYQWKVLPQGMSNSP | |
| | | ATACTCCAATTTTTGTAATTAAGAAAAAGTCAGGAAAGTGGAGACTGC | | TMCQLYVQEALLPVREQFPSLILLLYMDDILLCHKDLTMLQ | |
| | | TCCATGACCTCAGAGCCATTAATGAGCAAATGAACTTATTTGGCCCAGT | | KAYPFLLKTLSQWGLQIATEKVQISDTGQFLGSVVSPDKIV | |
| | | ACAGAGGGGTCTCCCTGTACTTTCCGCCTTACCACGTGGCTGGAATTTA | | PQKVEIRRDHLHTLNDFQKLLGDINWLRPFLKIPSAELRPL | |
| | | ATTATTATAGATATTAAAGATTGTTTCTTTTCTATACCTTTGTGTCCAAG | | FSILEGDPHISSPRTLTLAANQALQKVEKALQNAQLQRIED | |
| | | GGATAGGCCCAGATTTGCCTTTACCATCCCCTCTATTAATCACATGGAA | | SQPFSLCVFKTAQLPTAVLWQNGPLLWIHPNVSPAKIIDWY | |
| | | CCTGATAAGAGGTATCAATGGAAGGTCTTACCACAGGGAATGTCCAAT | | PDAIAQLALKGLKAAITHFGQSPYLLIVPYTAAQVQTLAAT | |
| | | AGTCCTACAATGTGCCAACTTTATGTGCAAGAAGCTCTTTTGCCAGTGA | | SNDWAVLVTSFSGKIDNHYPKHPILQFAQNQSVVFPQITVR | |
| | | GGGAACAATTCCCCTCTTTAATTTTGCTCCTTTACATGGATGACATCCTC | | NPLKNGIVVYTDGSKTGIGAYVANGKVVSKQYNENSPQVVE | |
| | | CTGTGCCATAAAGACCTTACCATGCTACAAAAGGCATATCCTTTTCTACT | | CLVVLEVLKTFLEPLNIVSDSCYVVNAVNLLEVAGVIKPSS | |
| | | TAAAACTTTAAGTCAGTGGGGTTTACAGATAGCCACAGAAAAGGTCCA | | RVANIFQQIQLVLLSRRFPVYITHVRAHSGLPGPMALGNNL | |
| | | AATTTCTGATACAGGACAATTCTTGGGCTCTGTGGTGTCCCCAGATAAG | | ADKATKVVAAALSSPVEAARNFHNNFHVTAETLRSRFSLTR | |
| | | ATTGTGCCCCAAAAGGTAGAGATAAGAAGAGATCACCTCCATACCTTA | | KEARDIVTQCQSCCEFLPVPHVGINPRGIRPLQVWQMDVTH | |
| | | AATGATTTTCAAAAGCTGTTGGGAGATATTAATTGGCTCAGACCTTTTT | | VSSFGKLQYLHVSIDTCSGIMFASPLTGEKASHVIQHCLEA | |
| | | TAAAGATTCCTTCCGCTGAGTTAAGGCCTTTGTTTAGTATTTTAGAAGG | | WSAWGKPRLLKTDNGPAYTSQKFQQFCRQMDVTHLTGLPYN | |
| | | AGATCCTCATATCTCCTCCCCTAGGACTCTTACTCTAGCTGCTAACCAGG | | PQGQGIVERAHRTLKTYLIKQKRGTFEETVPRAPRVSVSMA | |
| | | CCTTACAAAAGGTGGAAAAAGCCTTACAGAATGCACAATTACAACGTA | | LFTLNFLNIDAHGHTAAERHCTEPDRPNEMVKWKNVLDNKW | |
| | | TTGAGGATTCGCAGCCTTTCAGTTTGTGTGTCTTTAAGACAGCACAATT | | YGPDPILIRSRGAICVFPQNENNPFWIPERLTRKIQTDQGN | |
| | | GCCAACTGCAGTTTTGTGGCAGAATGGGCCATTGTTGTGGATCCATCC | | TNVPRLGDVQGVNNKKRAALGDNVDISTPNDGDV* | |
| | | AAACGTATCCCCAGCTAAAATAATAGATTGGTATCCTGATGCAATTGCA | | | |
| | | CAGCTTGCCCTTAAAGGTCTAAAAGCAGCAATCACCCACTTTGGGCAAA | | | |
| | | GTCCATATCTTTTAATTGTACCTTATACCGCTGCACAGGTTCAAACCTTG | | | |
| | | GCAGCCACATCTAATGATTGGGCAGTTTTAGTTACCTCCTTTTCAGGAA | | | |
| | | AAATAGATAACCATTATCCAAAACATCCAATCTTACAGTTTGCCCAAAA | | | |
| | | TCAATCTGTTGTGTTTCCACAAATAACAGTAAGAAACCCACTTAAAAAT | | | |
| | | GGGATTGTGGTATATACTGATGGATCAAAAACTGGCATAGGTGCCTAT | | | |
| | | GTGGCTAATGGTAAAGTGGTATCCAAACAATATAATGAAAATTCACCTC | | | |
| | | AAGTGGTAGAATGTTTAGTGGTCTTAGAAGTTTTAAAAACCTTTTTAGA | | | |
| | | ACCCCTTAATATTGTGTCAGATTCCTGTTATGTGGTTAATGCAGTAAATC | | | |
| | | TTTTAGAAGTGGCTGGAGTGATTAAGCCTTCCAGTAGAGTTGCCAATAT | | | |
| | | TTTTCAGCAGATACAATTAGTTTTGTTATCTAGAAGATTTCCTGTTTATA | | | |
| | | TTACTCATGTTAGAGCCCATTCAGGCCTACCTGGCCCCATGGCTCTGGG | | | |
| | | AAATAATTTGGCAGATAAGGCCACTAAAGTGGTGGCTGCTGCCCTATC | | | |
| | | ATCCCCGGTAGAGGCTGCAAGAAATTTTCATAACAATTTTCATGTGACG | | | |
| | | GCTGAAACATTACGCAGTCGTTTCTCCTTGACAAGAAAAGAAGCCCGT | | | |
| | | GACATTGTTACTCAATGTCAAAGCTGCTGTGAGTTCTTGCCAGTTCCTC | | | |
| | | ATGTGGGAATTAACCCACGCGGTATTCGACCTCTACAGGTCTGGCAAA | | | |
| | | TGGATGTTACACATGTTTCTTCCTTTGGAAAACTTCAATATCTCCATGTG | | | |
| | | TCCATTGACACATGTTCTGGCATCATGTTTGCTTCTCCATTAACCGGAGA | | | |
| | | AAAAGCCTCACATGTGATTCAACATTGCCTTGAGGCATGGAGTGCTTG | | | |
| | | GGGGAAACCCAGACTCCTTAAGACTGATAATGGACCAGCTTATACGTC | | | |
| | | TCAAAAATTCCAACAGTTCTGCCGTCAGATGGACGTGACCCACCTGACT | | | |
| | | GGACTTCCATACAACCCTCAAGGACAGGGTATTGTTGAGCGTGCGCAT | | | |
| | | CGCACCCTCAAAACCTATCTTATAAAACAGAAGAGGGGAACTTTTGAG | | | |
| | | GAGACTGTACCCCGAGCACCAAGAGTGTCGGTGTCTATGGCACTCTTT | | | |
| | | ACACTCAATTTTTTAAATATTGATGCTCATGGCCATACTGCGGCTGAAC | | | |
| | | GTCATTGTACAGAGCCAGATAGGCCCAATGAGATGGTTAAATGGAAAA | | | |
| | | ATGTCCTTGATAATAAATGGTATGGCCCGGATCCTATTTTGATAAGATC | | | |
| | | CAGGGGAGCTATCTGTGTTTTCCCACAGAATGAAAACAACCCATTTTGG | | | |
| | | ATACCAGAAAGACTCACCCGAAAAATCCAGACTGACCAAGGAAATACT | | | |
| | | AATGTCCCTCGTCTTGGTGATGTCCAGGGCGTCAATAATAAAAAGAGA | | | |
| | | GCAGCGTTGGGGGATAATGTCGACATTTCCACTCCCAATGACGGTGAT | | | |
| | | GTATAA | | | |
| CIS_pCMV_ | PLV10021 | GAATTCGAGCTTGCATGCCTGCAGGTCGTTACATAACTTACGGTAAATG | 357 | N/A | |
| R-U5- | | GCCCGCCTGGCTGACCGCCCAACGACCCCCGCCCATTGACGTCAATAAT | | | |
| IAP- | | GACGTATGTTCCCATAGTAACGCCAATAGGGACTTTCCATTGACGTCAA | | | |
| 92L23- | | TGGGTGGAGTATTTACGGTAAACTGCCCACTTGGCAGTACATCAAGTG | | | |
| delPol_ | | TATCATATGCCAAGTACGCCCCCTATTGACGTCAATGACGGTAAATGGC | | | |
| EF1- | | CCGCCTGGCATTATGCCCAGTACATGACCTTATGGGACTTTCCTACTTG | | | |
| GFPai- | | GCAGTACATCTACGTATTAGTCATCGCTATTACCATGGTGATGCGGTTT | | | |
| LTR_v1 | | TGGCAGTACATCAATGGGCGTGGATAGCGGTTTGACTCACGGGGATTT | | | |
| | | CCAAGTCTCCACCCCATTGACGTCAATGGGAGTTTGTTTTGGCACCAAA | | | |
| | | ATCAACGGGACTTTCCAAAATGTCGTAACAACTCCGCCCCATTGACGCA | | | |
| | | AATGGGCGGTAGGCGTGTACGGTGGGAGGTCTATATAAGCAGAGCTC | | | |
| | | GTTTAGTGAACCGTCAGGGACGGGGTTTCGTTTTCTCTCTCTCTTGCTTC | | | |
| | | TCGCTCGCTCTTGCTTCTTGCACTCTGGCTCCTGAAGATGTAAGCAATA | | | |
| | | AAGTTTTGCCGCAGAAGATTCTGGTCTGTGGTGTTCTTCCTGGCCGGGC | | | |
| | | GTGAGAACGCGTCTAATAACAATTGGTGCCGAATTCCGGGACGAGAAA | | | |
| | | AAAACTCGGGACTGGCGCAAGGAAGATCCCTCATTCCAGAACCAGAAC | | | |
| | | TGCGGGTCGCGGTAATAAAGGTTCCCGTAAAGCAGACTGTTAAGAAG | | | |
| | | GATTCAACTGTATGAATTCAGAACTTTTCAGCTGGGGAACGAGAGTAC | | | |
| | | CAGTGAGTACAGCTTTACGAGGTAAGTCTGATCTTGAACTTTCTAAGGA | | | |
| | | AATTCAAGACAGTCTATCAGAAGTAAAGTGGAATATGTTTGGCCTTGA | | | |
| | | ATTTTTTCTGGTGTTAGGAGCCCTTTTGTTCCTTTTCACATGTTATCAAG | | | |
| | | TGATTAAGATAGGGCTGAAAATTCTAGAGGAAATTCAGGACAAGCTAT | | | |
| | | CAGAAGTAAAGCGGGGAGAGAGAGTAGGAGCAAAGAGAAAATATGG | | | |
| | | TACACAAAATAAGTATACAGGCCTTTCCAAGGGTCTTGAACCCGAGGA | | | |
| | | AAAGTTAAGGTTAGGTAGGAATACCTGGAGAGAGATTAGAAGAAAAA | | | |
| | | GAGGAAAAAGGGAAAAGAAGAAAGATCAATTAGCGGAGGTCTCTAG | | | |
| | | GAGATACTCGTCACTAGATGAGCTCAGGAAGCCAGCTCTTAGTAGTTC | | | |
| | | TGAAGCAGATGAAGAATTCTCCTCTGAGGAAACAGACTGGGAGGAAG | | | |
| | | AAGCAGCCCATTACCAGCCAGCTAATTGGTCAAGAAAAAAGCCAAAAG | | | |
| | | CGGCTGGCGAAGGCCAGTTTGCTGATTGGCCTCAGGGCAGTCGGCTTC | | | |
| | | AAGGTCCGCCCTATGCGGAGTCCCCGCCCTGCGTAGTGCGTCAGCAAT | | | |
| | | GCGCAGAGAGGCAGTGCGCAGAGAGGCAGTGCGCAGACTCATTCATT | | | |
| | | CCCAGAGAGGAACAAAGGAAAATACAACAGGCATTTCCGGTCTTTGAA | | | |
| | | GGAGCCGAGGGTGGGCGTGTCCACGCTCCGGTAGAATACTTACAAATT | | | |
| | | AAAGAAATTGCCGAGTCGGTCCGTAAATATGGAACCAATGCTAATTTT | | | |
| | | ACCTTGGTGCAGTTAGACAGGCTCGCCGGCATGGCACTAACTCCTGCT | | | |
| | | GACTGGCAAACGGTTGTAAAAGCCGCTCTCCCTAGTATGGGCAAATAT | | | |
| | | ATGGAATGGAGAGCGCTTTGGCACGAAGCTGCACAAGCGCAGGCCCG | | | |
| | | AGCAAACGCAGCTGCTTTGACTCCAGAGCAGAGAGATTGGACTTTTGA | | | |
| | | CTTGTTAACGGGTCAGGGAGCTTATTCTGCTGATCAGACAAACTACCAT | | | |
| | | TGGGGAGCTTATGCCCAGATTTCTTCCACGGCTATTAGGGCCTGGAAG | | | |
| | | GCGCTCTCTCGAGCAGGTGAAACCACTGGTCAGTTAACAAAGATAATC | | | |
| | | CAGGGACCTCAGGAATCCTTCTCAGATTTTGTGGCCAGAATGACAGAG | | | |
| | | GCAGCAGAGCGTATTTTTGGAGAGTCAGAGCAAGCTGCGCCTCTGATA | | | |
| | | GAACAGCTAATCTATGAGCAAGCCACAAAGGAGTGCCGAGCGGCCAT | | | |
| | | AGCCCCAAGAAAGAACAAAGGCTTACAAGACTGGCTCAGGGTCTGTCG | | | |
| | | AGAGCTTGGGGGACCTCTCAGCAATGCAGGTTTAGCGGCTGCCATCCT | | | |
| | | TCAATCCCAAAACCGCTCCATGGGCAGAAATAATCAGAGGACATGTTTT | | | |
| | | AACTGCGGAAAGCCTGGGCATTTTAAGAAAGATTGCAGAGCTCCAGAT | | | |
| | | AAACAGGGAGGGACTCTCACTCTTTGCTCTAAGTGTGGCAAGGGTTAT | | | |
| | | CATAGAGCTGACCAGTGTCGCTCTGTGAGGGATATAAAGGGCAGAGT | | | |
| | | CCTTCCCCCACCTGATAGTCAATCAGCTGATGTGCCAAAAAACGGGTCA | | | |
| | | TCGGGCCCTCGGTCCCAGGGCCCTCAAAGATATGGGAACCGGTTTGTC | | | |
| | | AGGACCCAGGAAGCAGTCAGAGAGGCGACCCAGGAAGACCCACAAG | | | |
| | | GGTGGACCTGCGTGCCGCCTCCGACTTCCTACTAATGCCTCAAATGAGT | | | |
| | | ATTCAGCCGGTGCCGGTGGAGCCTATACCATCCTTGCCCCCGGGAACC | | | |
| | | ATGGGCCTTATTCTCGGCCGGGGTTCACTCACCTTGCAGGGCTTAGTAG | | | |
| | | TCCACCCTGGAGTTATGGATTGTCAACATTCCCCTGAAATACAGGTCCT | | | |
| | | GTGCTCAAGCCCTAAAGGCGTTTTTTCTATTAGTAAAGGAGATAGGAT | | | |
| | | AGCTCAGCTGCTGCTCCTCCCTGATAATACCAGGGAGAAATTTGCAGG | | | |
| | | ACCTGAGATAAAGAAAATGGGCTCCTCAGGAAATGATTCTGCCTATTT | | | |
| | | GGTTGTATCTTTAAATGATAGACCTAAGCTCCGCCTTAAGATTAACGGA | | | |
| | | AAAGAGTTTGAAGGCATCCTTGATACCGGAGCAGATAAAAGTATAATT | | | |
| | | TCTACACATTGGTGGCCCAAAGCATGGCCCACCACAGAGTCATCTCATT | | | |
| | | CATTACAGGGCCTAGGATATCAATCATGTCCCACTATAAGCTCCATTGC | | | |
| | | CTTGACGTGGGAATCCTCTGAAGGACAGCAAGGGAAATTCATACCTTA | | | |
| | | TGTGCTCCCACTCCCGGTTAACCTCTGGGGAAGGGATATTATGCAGCAT | | | |
| | | TTGGGCCTTATTTTGTCCAATGAAAACGCCCCATCAGGAGGGTATTCAG | | | |
| | | CTAAAGCAAAAAATATCATGGCAAAGATGGGTTATAAAGAAGGAAAA | | | |
| | | GGGTTAGGACATCAAGAACAGGGAAGGATAGAGCCCATCTCACCTAAT | | | |
| | | GGAAACCAAGACAGACAGGGTCTGGGTTTTCCTTAGCGTAATGCTCAA | | | |
| | | GTAgaacaaacgacccaacacccgtgcgttttattctgtctttttattgccgatcccccggccg | | | |
| | | ctttacttgtacagctcgtccatgccgagagtgatcccggcggcggtcacgaactccagcagg | | | |
| | | accatgtgatcgcgcttctcgttggggtctttgctcagggcggactgggtgctcaggtaagtat | | | |
| | | caaggttacaagacaggtttaaggagaccaatagaaactgggcttgtcgagacagagaaga | | | |
| | | ctcttgcgtttctgataggcacctattggtcttactgacatccactttgcctttctctccacag | | | |
| | | gtagtggttgtcgggcagcagcacggggccgtcgccgatgggggtgttctgctggtagtggtcg | | | |
| | | gcgagctgcacgctgccgtcctcgatgttgtggcggatcttgaagttcaccttgatgccgttct | | | |
| | | tctgcttgtcggccatgatatagacgttgtggctgttgtagttgtactccagcttgtgccccag | | | |
| | | gatgttgccgtcctccttgaagtcgatgcccttcagctcgatgcggttcaccagggtgtcgccc | | | |
| | | tcgaacttcacctcggcgcgggtcttgtagttgccgtcgtccttgaagaagatggtgcgctcct | | | |
| | | ggacgtagccttcgggcatggcggacttgaagaagtcgtgctgcttcatgtggtcggggtagcg | | | |
| | | gctgaagcactgcacgccgtaggtcagggtggtcacgagggtgggccagggcacgggcagctt | | | |
| | | gccggtggtgcagatgaacttcagggtcagcttgccgtaggtggcatcgccctcgccctcgcc | | | |
| | | ggacacgctgaacttgtggccgtttacgtcgccgtccagctcgaccaggatgggcaccacccc | | | |
| | | ggtgaacagctcctcgcccttgctcaccatggtggctttaccaacagtaccggaatgccaagc | | | |
| | | ttgggtcctgtgttctggcggcaaacccgttgcgaaaaagaacgttcacggcgactactgcac | | | |
| | | ttatatacggttctcccccaccctcgggaaaaaggcggagccagtacacgacatcactttccc | | | |
| | | agtttaccccgcgccaccttctctaggcaccggatcaattgccgacccctccccccaacttctc | | | |
| | | ggggactgtgggcgatgtgcgctctgcccTTCTCCTGCTTTTTTACCACTAACTAG | | | |
| | | GAACTGGGTTTGGCCTTAATTCAGACAGCCTTGGCTCTGTCTGGACAG | | | |
| | | GTCCAGACAACTGACACCATTAACACTTTGTCAGCCTCAGTGACTACAG | | | |
| | | TCATAGATGAACAGGCCTCAGCTAATGTCAAGATACAGAGAGGTCTCA | | | |
| | | TGCTGGTTAATCAACTCATAGATCTTGTCCAGATACAACTAGATGTATT | | | |
| | | ATGACAATTAACTCAGCTGGGATGTGAACAAAAGTTTCCGGGATTGTG | | | |
| | | TGTTATTTCCATTCAGTATGTTAAATTTACTAGGACAGCTAATTTGTCAA | | | |
| | | AAAGTCTTTTTCAGTATATGTTACAGAATTGGATGGCTGAATTTGAACA | | | |
| | | GATCCTTCGGGAATTGAGACTTCAGGTCAACTCCACGCGCTTGGACCT | | | |
| | | GTCGCTGACCAAAGGATTACCCAATTGGATCTCCTCAGCATTTTCCTTCT | | | |
| | | TTAAAAAATGGGTGGGATTAATATTATTTGGAGATACACTTTGCTGTGG | | | |
| | | ATTAGTGTTGCTTCTTTGATTGGTCTGTAAGCTTAAGGCCTAAACTAGG | | | |
| | | AGAGACAAGGTGGTTATTGCCCAGGCGCTTGCAGGACTAGAACATGG | | | |
| | | AGCTCCCCCTGATATATGGTTATCTATGCTTAGGCAATAGGTCGCTGGC | | | |
| | | CACTCAGCTCTTACATCTCACGAGGCTAGACTCATTGCACGGGATGGA | | | |
| | | GTGAGTGTGCTTCAGCAGCCCGAGAGAGTTGCACGGCTAAGCACTGCA | | | |
| | | ATGGAAAGGCTCTGCGGCATATATGAGCCTATTCTAGGGAGACATGTC | | | |
| | | ATCTTTCATGAAGGTTCAGTGTCCTAGTTCCCTTCCCCCAGGCAAAACG | | | |
| | | ACACGGGAGCAGGTCAGGGTTGCTCTGGGTAAAAGCCTGTGAGCCTA | | | |
| | | AGAGCTAATCCTGTACATGGCTCCTTTACCTACACACTGGGGATTTGAC | | | |
| | | CTCTATCTCCACTCTCATTAATATGGGTGGCCTATTTGCTCTTATTAAAA | | | |
| | | GAAAAGGGGGAGATGTTGGGAGCCGCGCCCACATTCGCCGTTACAAG | | | |
| | | ATGGCGCTGACAGCTGTGTTCTAAGTGGTAAACAAATAATCTGCGCAT | | | |
| | | GTGCCGAGGGTGGTTCTTCACTCTATGTGCTCTGCCTTCCCCGTGACGT | | | |
| | | CAACTCGGCCGATGGGCTGCAGCCAATCAGGGAGTGACACGTCCTAG | | | |
| | | GCGAAGGAGAATTCTCTTTAATAGGGACGGGGTTTTGTTTTCTCTCTCT | | | |
| | | CTTGCTTCTCGCTCGCTCTTGCTTCTTGCACTCTGGCTCCTGAAGATGTA | | | |
| | | AGCAATAAAGTTTTGCCGCAGAAGATTCTGGTCTGTGGTGTTCTTCCTG | | | |
| | | GCCGGGCGTGAGAACGCGTCTAATAACAGCGGCCGCAACAGGGGATC | | | |
| | | CAGACATGATAAGATACATTGATGAGTTTGGACAAACCACAACTAGAA | | | |
| | | TGCAGTGAAAAAAATGCTTTATTTGTGAAATTTGTGATGCTATTGCTTT | | | |
| | | ATTTGTAACCATTATAAGCTGCAATAAACAAGTTAACAACAACAATTGC | | | |
| | | ATTCATTTTATGTTTCAGGTTCAGGGGGAGGTGTGGGAGGTTTTTTCG | | | |
| | | GATCCTCTAGAGTCGACCTGCAGGCATGCAAGCTTGGCGTAATCATGG | | | |
| | | TCATAGCTGTTTCCTGTGTGAAATTGTTATCCGCTCACAATTCCACACAA | | | |
| | | CATACGAGCCGGAAGCATAAAGTGTAAAGCCTGGGGTGCCTAATGAG | | | |
| | | TGAGCTAACTCACATTAATTGCGTTGCGCTCACTGCCCGCTTTCCAGTC | | | |
| | | GGGAAACCTGTCGTGCCAGCTGCATTAATGAATCGGCCAACGCGCGG | | | |
| | | GGAGAGGCGGTTTGCGTATTGGGCGCTCTTCCGCTTCCTCGCTCACTGA | | | |
| | | CTCGCTGCGCTCGGTCGTTCGGCTGCGGCGAGCGGTATCAGCTCACTC | | | |
| | | AAAGGCGGTAATACGGTTATCCACAGAATCAGGGGATAACGCAGGAA | | | |
| | | AGAACATGTGAGCAAAAGGCCAGCAAAAGGCCAGGAACCGTAAAAAG | | | |
| | | GCCGCGTTGCTGGCGTTTTTCCATAGGCTCCGCCCCCCTGACGAGCATC | | | |
| | | ACAAAAATCGACGCTCAAGTCAGAGGTGGCGAAACCCGACAGGACTA | | | |
| | | TAAAGATACCAGGCGTTTCCCCCTGGAAGCTCCCTCGTGCGCTCTCCTG | | | |
| | | TTCCGACCCTGCCGCTTACCGGATACCTGTCCGCCTTTCTCCCTTCGGGA | | | |
| | | AGCGTGGCGCTTTCTCATAGCTCACGCTGTAGGTATCTCAGTTCGGTGT | | | |
| | | AGGTCGTTCGCTCCAAGCTGGGCTGTGTGCACGAACCCCCCGTTCAGC | | | |
| | | CCGACCGCTGCGCCTTATCCGGTAACTATCGTCTTGAGTCCAACCCGGT | | | |
| | | AAGACACGACTTATCGCCACTGGCAGCAGCCACTGGTAACAGGATTAG | | | |
| | | CAGAGCGAGGTATGTAGGCGGTGCTACAGAGTTCTTGAAGTGGTGGC | | | |
| | | CTAACTACGGCTACACTAGAAGGACAGTATTTGGTATCTGCGCTCTGCT | | | |
| | | GAAGCCAGTTACCTTCGGAAAAAGAGTTGGTAGCTCTTGATCCGGCAA | | | |
| | | ACAAACCACCGCTGGTAGCGGTGGTTTTTTTGTTTGCAAGCAGCAGATT | | | |
| | | ACGCGCAGAAAAAAAGGATCTCAAGAAGATCCTTTGATCTTTTCTACG | | | |
| | | GGGTCTGACGCTCAGTGGAACGAAAACTCACGTTAAGGGATTTTGGTC | | | |
| | | ATGAGATTATCAAAAAGGATCTTCACCTAGATCCTTTTAAATTAAAAAT | | | |
| | | GAAGTTTTAAATCAATCTAAAGTATATATGAGTAAACTTGGTCTGACAG | | | |
| | | TTACCAATGCTTAATCAGTGAGGCACCTATCTCAGCGATCTGTCTATTTC | | | |
| | | GTTCATCCATAGTTGCCTGACTCCCCGTCGTGTAGATAACTACGATACG | | | |
| | | GGAGGGCTTACCATCTGGCCCCAGTGCTGCAATGATACCGCGAGACCC | | | |
| | | ACGCTCACCGGCTCCAGATTTATCAGCAATAAACCAGCCAGCCGGAAG | | | |
| | | GGCCGAGCGCAGAAGTGGTCCTGCAACTTTATCCGCCTCCATCCAGTCT | | | |
| | | ATTAATTGTTGCCGGGAAGCTAGAGTAAGTAGTTCGCCAGTTAATAGT | | | |
| | | TTGCGCAACGTTGTTGCCATTGCTACAGGCATCGTGGTGTCACGCTCGT | | | |
| | | CGTTTGGTATGGCTTCATTCAGCTCCGGTTCCCAACGATCAAGGCGAGT | | | |
| | | TACATGATCCCCCATGTTGTGCAAAAAAGCGGTTAGCTCCTTCGGTCCT | | | |
| | | CCGATCGTTGTCAGAAGTAAGTTGGCCGCAGTGTTATCACTCATGGTTA | | | |
| | | TGGCAGCACTGCATAATTCTCTTACTGTCATGCCATCCGTAAGATGCTTT | | | |
| | | TCTGTGACTGGTGAGTACTCAACCAAGTCATTCTGAGAATAGTGTATGC | | | |
| | | GGCGACCGAGTTGCTCTTGCCCGGCGTCAATACGGGATAATACCGCGC | | | |
| | | CACATAGCAGAACTTTAAAAGTGCTCATCATTGGAAAACGTTCTTCGGG | | | |
| | | GCGAAAACTCTCAAGGATCTTACCGCTGTTGAGATCCAGTTCGATGTAA | | | |
| | | CCCACTCGTGCACCCAACTGATCTTCAGCATCTTTTACTTTCACCAGCGT | | | |
| | | TTCTGGGTGAGCAAAAACAGGAAGGCAAAATGCCGCAAAAAAGGGAA | | | |
| | | TAAGGGCGACACGGAAATGTTGAATACTCATACTCTTCCTTTTTCAATA | | | |
| | | TTATTGAAGCATTTATCAGGGTTATTGTCTCATGAGCGGATACATATTT | | | |
| | | GAATGTATTTAGAAAAATAAACAAATAGGGGTTCCGCGCACATTTCCCC | | | |
| | | GAAAAGTGCCACCTGACGTCTAAGAAACCATTATTATCATGACATTAAC | | | |
| | | CTATAAAAATAGGCGTATCACGAGGCCCTTTCGTCTCGCGCGTTTCGGT | | | |
| | | GATGACGGTGAAAACCTCTGACACATGCAGCTCCCGGAGACGGTCACA | | | |
| | | GCTTGTCTGTAAGCGGATGCCGGGAGCAGACAAGCCCGTCAGGGCGC | | | |
| | | GTCAGCGGGTGTTGGCGGGTGTCGGGGCTGGCTTAACTATGCGGCAT | | | |
| | | CAGAGCAGATTGTACTGAGAGTGCACCATATGCGGTGTGAAATACCGC | | | |
| | | ACAGATGCGTAAGGAGAAAATACCGCATCAGGCGCCATTCGCCATTCA | | | |
| | | GGCTGCGCAACTGTTGGGAAGGGCGATCGGTGCGGGCCTCTTCGCTAT | | | |
| | | TACGCCAGCTGGCGAAAGGGGGATGTGCTGCAAGGCGATTAAGTTGG | | | |
| | | GTAACGCCAGGGTTTTCCCAGTCACGACGTTGTAAAACGACGGCCAGT | | | |
| CIS_pCMV_ | PLV10023 | GAATTCGAGCTTGCATGCCTGCAGGTCGTTACATAACTTACGGTAAATG | 358 | N/A | |
| R-U5- | | GCCCGCCTGGCTGACCGCCCAACGACCCCCGCCCATTGACGTCAATAAT | | | |
| IAP- | | GACGTATGTTCCCATAGTAACGCCAATAGGGACTTTCCATTGACGTCAA | | | |
| 92L23_ | | TGGGTGGAGTATTTACGGTAAACTGCCCACTTGGCAGTACATCAAGTG | | | |
| EF1- | | TATCATATGCCAAGTACGCCCCCTATTGACGTCAATGACGGTAAATGGC | | | |
| GFPai- | | CCGCCTGGCATTATGCCCAGTACATGACCTTATGGGACTTTCCTACTTG | | | |
| LTR_v1 | | GCAGTACATCTACGTATTAGTCATCGCTATTACCATGGTGATGCGGTTT | | | |
| | | TGGCAGTACATCAATGGGCGTGGATAGCGGTTTGACTCACGGGGATTT | | | |
| | | CCAAGTCTCCACCCCATTGACGTCAATGGGAGTTTGTTTTGGCACCAAA | | | |
| | | ATCAACGGGACTTTCCAAAATGTCGTAACAACTCCGCCCCATTGACGCA | | | |
| | | AATGGGCGGTAGGCGTGTACGGTGGGAGGTCTATATAAGCAGAGCTC | | | |
| | | GTTTAGTGAACCGTCAGGGACGGGGTTTCGTTTTCTCTCTCTCTTGCTTC | | | |
| | | TCGCTCGCTCTTGCTTCTTGCACTCTGGCTCCTGAAGATGTAAGCAATA | | | |
| | | AAGTTTTGCCGCAGAAGATTCTGGTCTGTGGTGTTCTTCCTGGCCGGGC | | | |
| | | GTGAGAACGCGTCTAATAACAATTGGTGCCGAATTCCGGGACGAGAAA | | | |
| | | AAAACTCGGGACTGGCGCAAGGAAGATCCCTCATTCCAGAACCAGAAC | | | |
| | | TGCGGGTCGCGGTAATAAAGGTTCCCGTAAAGCAGACTGTTAAGAAG | | | |
| | | GATTCAACTGTATGAATTCAGAACTTTTCAGCTGGGGAACGAGAGTAC | | | |
| | | CAGTGAGTACAGCTTTACGAGGTAAGTCTGATCTTGAACTTTCTAAGGA | | | |
| | | AATTCAAGACAGTCTATCAGAAGTAAAGTGGAATATGTTTGGCCTTGA | | | |
| | | ATTTTTTCTGGTGTTAGGAGCCCTTTTGTTCCTTTTCACATGTTATCAAG | | | |
| | | TGATTAAGATAGGGCTGAAAATTCTAGAGGAAATTCAGGACAAGCTAT | | | |
| | | CAGAAGTAAAGCGGGGAGAGAGAGTAGGAGCAAAGAGAAAATATGG | | | |
| | | TACACAAAATAAGTATACAGGCCTTTCCAAGGGTCTTGAACCCGAGGA | | | |
| | | AAAGTTAAGGTTAGGTAGGAATACCTGGAGAGAGATTAGAAGAAAAA | | | |
| | | GAGGAAAAAGGGAAAAGAAGAAAGATCAATTAGCGGAGGTCTCTAG | | | |
| | | GAGATACTCGTCACTAGATGAGCTCAGGAAGCCAGCTCTTAGTAGTTC | | | |
| | | TGAAGCAGATGAAGAATTCTCCTCTGAGGAAACAGACTGGGAGGAAG | | | |
| | | AAGCAGCCCATTACCAGCCAGCTAATTGGTCAAGAAAAAAGCCAAAAG | | | |
| | | CGGCTGGCGAAGGCCAGTTTGCTGATTGGCCTCAGGGCAGTCGGCTTC | | | |
| | | AAGGTCCGCCCTATGCGGAGTCCCCGCCCTGCGTAGTGCGTCAGCAAT | | | |
| | | GCGCAGAGAGGCAGTGCGCAGAGAGGCAGTGCGCAGACTCATTCATT | | | |
| | | CCCAGAGAGGAACAAAGGAAAATACAACAGGCATTTCCGGTCTTTGAA | | | |
| | | GGAGCCGAGGGTGGGCGTGTCCACGCTCCGGTAGAATACTTACAAATT | | | |
| | | AAAGAAATTGCCGAGTCGGTCCGTAAATATGGAACCAATGCTAATTTT | | | |
| | | ACCTTGGTGCAGTTAGACAGGCTCGCCGGCATGGCACTAACTCCTGCT | | | |
| | | GACTGGCAAACGGTTGTAAAAGCCGCTCTCCCTAGTATGGGCAAATAT | | | |
| | | ATGGAATGGAGAGCGCTTTGGCACGAAGCTGCACAAGCGCAGGCCCG | | | |
| | | AGCAAACGCAGCTGCTTTGACTCCAGAGCAGAGAGATTGGACTTTTGA | | | |
| | | CTTGTTAACGGGTCAGGGAGCTTATTCTGCTGATCAGACAAACTACCAT | | | |
| | | TGGGGAGCTTATGCCCAGATTTCTTCCACGGCTATTAGGGCCTGGAAG | | | |
| | | GCGCTCTCTCGAGCAGGTGAAACCACTGGTCAGTTAACAAAGATAATC | | | |
| | | CAGGGACCTCAGGAATCCTTCTCAGATTTTGTGGCCAGAATGACAGAG | | | |
| | | GCAGCAGAGCGTATTTTTGGAGAGTCAGAGCAAGCTGCGCCTCTGATA | | | |
| | | GAACAGCTAATCTATGAGCAAGCCACAAAGGAGTGCCGAGCGGCCAT | | | |
| | | AGCCCCAAGAAAGAACAAAGGCTTACAAGACTGGCTCAGGGTCTGTCG | | | |
| | | AGAGCTTGGGGGACCTCTCAGCAATGCAGGTTTAGCGGCTGCCATCCT | | | |
| | | TCAATCCCAAAACCGCTCCATGGGCAGAAATAATCAGAGGACATGTTTT | | | |
| | | AACTGCGGAAAGCCTGGGCATTTTAAGAAAGATTGCAGAGCTCCAGAT | | | |
| | | AAACAGGGAGGGACTCTCACTCTTTGCTCTAAGTGTGGCAAGGGTTAT | | | |
| | | CATAGAGCTGACCAGTGTCGCTCTGTGAGGGATATAAAGGGCAGAGT | | | |
| | | CCTTCCCCCACCTGATAGTCAATCAGCTGATGTGCCAAAAAACGGGTCA | | | |
| | | TCGGGCCCTCGGTCCCAGGGCCCTCAAAGATATGGGAACCGGTTTGTC | | | |
| | | AGGACCCAGGAAGCAGTCAGAGAGGCGACCCAGGAAGACCCACAAG | | | |
| | | GGTGGACCTGCGTGCCGCCTCCGACTTCCTACTAATGCCTCAAATGAGT | | | |
| | | ATTCAGCCGGTGCCGGTGGAGCCTATACCATCCTTGCCCCCGGGAACC | | | |
| | | ATGGGCCTTATTCTCGGCCGGGGTTCACTCACCTTGCAGGGCTTAGTAG | | | |
| | | TCCACCCTGGAGTTATGGATTGTCAACATTCCCCTGAAATACAGGTCCT | | | |
| | | GTGCTCAAGCCCTAAAGGCGTTTTTTCTATTAGTAAAGGAGATAGGAT | | | |
| | | AGCTCAGCTGCTGCTCCTCCCTGATAATACCAGGGAGAAATTTGCAGG | | | |
| | | ACCTGAGATAAAGAAAATGGGCTCCTCAGGAAATGATTCTGCCTATTT | | | |
| | | GGTTGTATCTTTAAATGATAGACCTAAGCTCCGCCTTAAGATTAACGGA | | | |
| | | AAAGAGTTTGAAGGCATCCTTGATACCGGAGCAGATAAAAGTATAATT | | | |
| | | TCTACACATTGGTGGCCCAAAGCATGGCCCACCACAGAGTCATCTCATT | | | |
| | | CATTACAGGGCCTAGGATATCAATCATGTCCCACTATAAGCTCCATTGC | | | |
| | | CTTGACGTGGGAATCCTCTGAAGGACAGCAAGGGAAATTCATACCTTA | | | |
| | | TGTGCTCCCACTCCCGGTTAACCTCTGGGGAAGGGATATTATGCAGCAT | | | |
| | | TTGGGCCTTATTTTGTCCAATGAAAACGCCCCATCAGGAGGGTATTCAG | | | |
| | | CTAAAGCAAAAAATATCATGGCAAAGATGGGTTATAAAGAAGGAAAA | | | |
| | | GGGTTAGGACATCAAGAACAGGGAAGGATAGAGCCCATCTCACCTAAT | | | |
| | | GGAAACCAAGACAGACAGGGTCTGGGTTTTCCTTAGCGGCCATTGGG | | | |
| | | GCAGCACGACCCATACCATGGAAAACAGGGGACCCAGTGTGGGTTCCT | | | |
| | | CAATGGCACCTATCCTCTGAAAAACTAGAAGCTGTGATTCAACTGGTA | | | |
| | | GAGGAACAATTAAAACTAGGCCATATTGAACCCTCTACCTCACCTTGGA | | | |
| | | ATACTCCAATTTTTGTAATTAAGAAAAAGTCAGGAAAGTGGAGACTGC | | | |
| | | TCCATGACCTCAGAGCCATTAATGAGCAAATGAACTTATTTGGCCCAGT | | | |
| | | ACAGAGGGGTCTCCCTGTACTTTCCGCCTTACCACGTGGCTGGAATTTA | | | |
| | | ATTATTATAGATATTAAAGATTGTTTCTTTTCTATACCTTTGTGTCCAAG | | | |
| | | GGATAGGCCCAGATTTGCCTTTACCATCCCCTCTATTAATCACATGGAA | | | |
| | | CCTGATAAGAGGTATCAATGGAAGGTCTTACCACAGGGAATGTCCAAT | | | |
| | | AGTCCTACAATGTGCCAACTTTATGTGCAAGAAGCTCTTTTGCCAGTGA | | | |
| | | GGGAACAATTCCCCTCTTTAATTTTGCTCCTTTACATGGATGACATCCTC | | | |
| | | CTGTGCCATAAAGACCTTACCATGCTACAAAAGGCATATCCTTTTCTACT | | | |
| | | TAAAACTTTAAGTCAGTGGGGTTTACAGATAGCCACAGAAAAGGTCCA | | | |
| | | AATTTCTGATACAGGACAATTCTTGGGCTCTGTGGTGTCCCCAGATAAG | | | |
| | | ATTGTGCCCCAAAAGGTAGAGATAAGAAGAGATCACCTCCATACCTTA | | | |
| | | AATGATTTTCAAAAGCTGTTGGGAGATATTAATTGGCTCAGACCTTTTT | | | |
| | | TAAAGATTCCTTCCGCTGAGTTAAGGCCTTTGTTTAGTATTTTAGAAGG | | | |
| | | AGATCCTCATATCTCCTCCCCTAGGACTCTTACTCTAGCTGCTAACCAGG | | | |
| | | CCTTACAAAAGGTGGAAAAAGCCTTACAGAATGCACAATTACAACGTA | | | |
| | | TTGAGGATTCGCAGCCTTTCAGTTTGTGTGTCTTTAAGACAGCACAATT | | | |
| | | GCCAACTGCAGTTTTGTGGCAGAATGGGCCATTGTTGTGGATCCATCC | | | |
| | | AAACGTATCCCCAGCTAAAATAATAGATTGGTATCCTGATGCAATTGCA | | | |
| | | CAGCTTGCCCTTAAAGGTCTAAAAGCAGCAATCACCCACTTTGGGCAAA | | | |
| | | GTCCATATCTTTTAATTGTACCTTATACCGCTGCACAGGTTCAAACCTTG | | | |
| | | GCAGCCACATCTAATGATTGGGCAGTTTTAGTTACCTCCTTTTCAGGAA | | | |
| | | AAATAGATAACCATTATCCAAAACATCCAATCTTACAGTTTGCCCAAAA | | | |
| | | TCAATCTGTTGTGTTTCCACAAATAACAGTAAGAAACCCACTTAAAAAT | | | |
| | | GGGATTGTGGTATATACTGATGGATCAAAAACTGGCATAGGTGCCTAT | | | |
| | | GTGGCTAATGGTAAAGTGGTATCCAAACAATATAATGAAAATTCACCTC | | | |
| | | AAGTGGTAGAATGTTTAGTGGTCTTAGAAGTTTTAAAAACCTTTTTAGA | | | |
| | | ACCCCTTAATATTGTGTCAGATTCCTGTTATGTGGTTAATGCAGTAAATC | | | |
| | | TTTTAGAAGTGGCTGGAGTGATTAAGCCTTCCAGTAGAGTTGCCAATAT | | | |
| | | TTTTCAGCAGATACAATTAGTTTTGTTATCTAGAAGATTTCCTGTTTATA | | | |
| | | TTACTCATGTTAGAGCCCATTCAGGCCTACCTGGCCCCATGGCTCTGGG | | | |
| | | AAATAATTTGGCAGATAAGGCCACTAAAGTGGTGGCTGCTGCCCTATC | | | |
| | | ATCCCCGGTAGAGGCTGCAAGAAATTTTCATAACAATTTTCATGTGACG | | | |
| | | GCTGAAACATTACGCAGTCGTTTCTCCTTGACAAGAAAAGAAGCCCGT | | | |
| | | GACATTGTTACTCAATGTCAAAGCTGCTGTGAGTTCTTGCCAGTTCCTC | | | |
| | | ATGTGGGAATTAACCCACGCGGTATTCGACCTCTACAGGTCTGGCAAA | | | |
| | | TGGATGTTACACATGTTTCTTCCTTTGGAAAACTTCAATATCTCCATGTG | | | |
| | | TCCATTGACACATGTTCTGGCATCATGTTTGCTTCTCCATTAACCGGAGA | | | |
| | | AAAAGCCTCACATGTGATTCAACATTGCCTTGAGGCATGGAGTGCTTG | | | |
| | | GGGGAAACCCAGACTCCTTAAGACTGATAATGGACCAGCTTATACGTC | | | |
| | | TCAAAAATTCCAACAGTTCTGCCGTCAGATGGACGTGACCCACCTGACT | | | |
| | | GGACTTCCATACAACCCTCAAGGACAGGGTATTGTTGAGCGTGCGCAT | | | |
| | | CGCACCCTCAAAACCTATCTTATAAAACAGAAGAGGGGAACTTTTGAG | | | |
| | | GAGACTGTACCCCGAGCACCAAGAGTGTCGGTGTCTATGGCACTCTTT | | | |
| | | ACACTCAATTTTTTAAATATTGATGCTCATGGCCATACTGCGGCTGAAC | | | |
| | | GTCATTGTACAGAGCCAGATAGGCCCAATGAGATGGTTAAATGGAAAA | | | |
| | | ATGTCCTTGATAATAAATGGTATGGCCCGGATCCTATTTTGATAAGATC | | | |
| | | CAGGGGAGCTATCTGTGTTTTCCCACAGAATGAAAACAACCCATTTTGG | | | |
| | | ATACCAGAAAGACTCACCCGAAAAATCCAGACTGACCAAGGAAATACT | | | |
| | | AATGTCCCTCGTCTTGGTGATGTCCAGGGCGTCAATAATAAAAAGAGA | | | |
| | | GCAGCGTTGGGGGATAATGTCGACATTTCCACTCCCAATGACGGTGAT | | | |
| | | GTATAATGCTCAAGTAgaacaaacgacccaacacccgtgcgttttattctgtctttttat | | | |
| | | tgccgatcccccggccgctttacttgtacagctcgtccatgccgagagtgatcccggcggcggt | | | |
| | | cacgaactccagcaggaccatgtgatcgcgcttctcgttggggtctttgctcagggcggactg | | | |
| | | ggtgctcaggtaagtatcaaggttacaagacaggtttaaggagaccaatagaaactgggctt | | | |
| | | gtcgagacagagaagactcttgcgtttctgataggcacctattggtcttactgacatccacttt | | | |
| | | gcctttctctccacaggtagtggttgtcgggcagcagcacggggccgtcgccgatgggggtgt | | | |
| | | tctgctggtagtggtcggcgagctgcacgctgccgtcctcgatgttgtggcggatcttgaagtt | | | |
| | | caccttgatgccgttcttctgcttgtcggccatgatatagacgttgtggctgttgtagttgtac | | | |
| | | tccagcttgtgccccaggatgttgccgtcctccttgaagtcgatgcccttcagctcgatgcggt | | | |
| | | tcaccagggtgtcgccctcgaacttcacctcggcgcgggtcttgtagttgccgtcgtccttgaa | | | |
| | | gaagatggtgcgctcctggacgtagccttcgggcatggcggacttgaagaagtcgtgctgcttc | | | |
| | | atgtggtcggggtagcggctgaagcactgcacgccgtaggtcagggtggtcacgagggtgggcc | | | |
| | | agggcacgggcagcttgccggtggtgcagatgaacttcagggtcagcttgccgtaggtggca | | | |
| | | tcgccctcgccctcgccggacacgctgaacttgtggccgtttacgtcgccgtccagctcgacca | | | |
| | | ggatgggcaccaccccggtgaacagctcctcgcccttgctcaccatggtggctttaccaacag | | | |
| | | taccggaatgccaagcttgggtcctgtgttctggcggcaaacccgttgcgaaaaagaacgttc | | | |
| | | acggcgactactgcacttatatacggttctcccccaccctcgggaaaaaggcggagccagta | | | |
| | | cacgacatcactttcccagtttaccccgcgccaccttctctaggcaccggatcaattgccgacc | | | |
| | | cctccccccaacttctcggggactgtgggcgatgtgcgctctgcccTTCTCCTGCTTTTTT | | | |
| | | ACCACTAACTAGGAACTGGGTTTGGCCTTAATTCAGACAGCCTTGGCTC | | | |
| | | TGTCTGGACAGGTCCAGACAACTGACACCATTAACACTTTGTCAGCCTC | | | |
| | | AGTGACTACAGTCATAGATGAACAGGCCTCAGCTAATGTCAAGATACA | | | |
| | | GAGAGGTCTCATGCTGGTTAATCAACTCATAGATCTTGTCCAGATACAA | | | |
| | | CTAGATGTATTATGACAATTAACTCAGCTGGGATGTGAACAAAAGTTTC | | | |
| | | CGGGATTGTGTGTTATTTCCATTCAGTATGTTAAATTTACTAGGACAGC | | | |
| | | TAATTTGTCAAAAAGTCTTTTTCAGTATATGTTACAGAATTGGATGGCT | | | |
| | | GAATTTGAACAGATCCTTCGGGAATTGAGACTTCAGGTCAACTCCACG | | | |
| | | CGCTTGGACCTGTCGCTGACCAAAGGATTACCCAATTGGATCTCCTCAG | | | |
| | | CATTTTCCTTCTTTAAAAAATGGGTGGGATTAATATTATTTGGAGATAC | | | |
| | | ACTTTGCTGTGGATTAGTGTTGCTTCTTTGATTGGTCTGTAAGCTTAAG | | | |
| | | GCCTAAACTAGGAGAGACAAGGTGGTTATTGCCCAGGCGCTTGCAGG | | | |
| | | ACTAGAACATGGAGCTCCCCCTGATATATGGTTATCTATGCTTAGGCAA | | | |
| | | TAGGTCGCTGGCCACTCAGCTCTTACATCTCACGAGGCTAGACTCATTG | | | |
| | | CACGGGATGGAGTGAGTGTGCTTCAGCAGCCCGAGAGAGTTGCACGG | | | |
| | | CTAAGCACTGCAATGGAAAGGCTCTGCGGCATATATGAGCCTATTCTA | | | |
| | | GGGAGACATGTCATCTTTCATGAAGGTTCAGTGTCCTAGTTCCCTTCCC | | | |
| | | CCAGGCAAAACGACACGGGAGCAGGTCAGGGTTGCTCTGGGTAAAAG | | | |
| | | CCTGTGAGCCTAAGAGCTAATCCTGTACATGGCTCCTTTACCTACACAC | | | |
| | | TGGGGATTTGACCTCTATCTCCACTCTCATTAATATGGGTGGCCTATTTG | | | |
| | | CTCTTATTAAAAGAAAAGGGGGAGATGTTGGGAGCCGCGCCCACATTC | | | |
| | | GCCGTTACAAGATGGCGCTGACAGCTGTGTTCTAAGTGGTAAACAAAT | | | |
| | | AATCTGCGCATGTGCCGAGGGTGGTTCTTCACTCTATGTGCTCTGCCTT | | | |
| | | CCCCGTGACGTCAACTCGGCCGATGGGCTGCAGCCAATCAGGGAGTG | | | |
| | | ACACGTCCTAGGCGAAGGAGAATTCTCTTTAATAGGGACGGGGTTTTG | | | |
| | | TTTTCTCTCTCTCTTGCTTCTCGCTCGCTCTTGCTTCTTGCACTCTGGCTC | | | |
| | | CTGAAGATGTAAGCAATAAAGTTTTGCCGCAGAAGATTCTGGTCTGTG | | | |
| | | GTGTTCTTCCTGGCCGGGCGTGAGAACGCGTCTAATAACAGCGGCCGC | | | |
| | | AACAGGGGATCCAGACATGATAAGATACATTGATGAGTTTGGACAAAC | | | |
| | | CACAACTAGAATGCAGTGAAAAAAATGCTTTATTTGTGAAATTTGTGAT | | | |
| | | GCTATTGCTTTATTTGTAACCATTATAAGCTGCAATAAACAAGTTAACA | | | |
| | | ACAACAATTGCATTCATTTTATGTTTCAGGTTCAGGGGGAGGTGTGGG | | | |
| | | AGGTTTTTTCGGATCCTCTAGAGTCGACCTGCAGGCATGCAAGCTTGGC | | | |
| | | GTAATCATGGTCATAGCTGTTTCCTGTGTGAAATTGTTATCCGCTCACA | | | |
| | | ATTCCACACAACATACGAGCCGGAAGCATAAAGTGTAAAGCCTGGGGT | | | |
| | | GCCTAATGAGTGAGCTAACTCACATTAATTGCGTTGCGCTCACTGCCCG | | | |
| | | CTTTCCAGTCGGGAAACCTGTCGTGCCAGCTGCATTAATGAATCGGCCA | | | |
| | | ACGCGCGGGGAGAGGCGGTTTGCGTATTGGGCGCTCTTCCGCTTCCTC | | | |
| | | GCTCACTGACTCGCTGCGCTCGGTCGTTCGGCTGCGGCGAGCGGTATC | | | |
| | | AGCTCACTCAAAGGCGGTAATACGGTTATCCACAGAATCAGGGGATAA | | | |
| | | CGCAGGAAAGAACATGTGAGCAAAAGGCCAGCAAAAGGCCAGGAACC | | | |
| | | GTAAAAAGGCCGCGTTGCTGGCGTTTTTCCATAGGCTCCGCCCCCCTGA | | | |
| | | CGAGCATCACAAAAATCGACGCTCAAGTCAGAGGTGGCGAAACCCGA | | | |
| | | CAGGACTATAAAGATACCAGGCGTTTCCCCCTGGAAGCTCCCTCGTGC | | | |
| | | GCTCTCCTGTTCCGACCCTGCCGCTTACCGGATACCTGTCCGCCTTTCTC | | | |
| | | CCTTCGGGAAGCGTGGCGCTTTCTCATAGCTCACGCTGTAGGTATCTCA | | | |
| | | GTTCGGTGTAGGTCGTTCGCTCCAAGCTGGGCTGTGTGCACGAACCCC | | | |
| | | CCGTTCAGCCCGACCGCTGCGCCTTATCCGGTAACTATCGTCTTGAGTC | | | |
| | | CAACCCGGTAAGACACGACTTATCGCCACTGGCAGCAGCCACTGGTAA | | | |
| | | CAGGATTAGCAGAGCGAGGTATGTAGGCGGTGCTACAGAGTTCTTGA | | | |
| | | AGTGGTGGCCTAACTACGGCTACACTAGAAGGACAGTATTTGGTATCT | | | |
| | | GCGCTCTGCTGAAGCCAGTTACCTTCGGAAAAAGAGTTGGTAGCTCTT | | | |
| | | GATCCGGCAAACAAACCACCGCTGGTAGCGGTGGTTTTTTTGTTTGCAA | | | |
| | | GCAGCAGATTACGCGCAGAAAAAAAGGATCTCAAGAAGATCCTTTGAT | | | |
| | | CTTTTCTACGGGGTCTGACGCTCAGTGGAACGAAAACTCACGTTAAGG | | | |
| | | GATTTTGGTCATGAGATTATCAAAAAGGATCTTCACCTAGATCCTTTTA | | | |
| | | AATTAAAAATGAAGTTTTAAATCAATCTAAAGTATATATGAGTAAACTT | | | |
| | | GGTCTGACAGTTACCAATGCTTAATCAGTGAGGCACCTATCTCAGCGAT | | | |
| | | CTGTCTATTTCGTTCATCCATAGTTGCCTGACTCCCCGTCGTGTAGATAA | | | |
| | | CTACGATACGGGAGGGCTTACCATCTGGCCCCAGTGCTGCAATGATAC | | | |
| | | CGCGAGACCCACGCTCACCGGCTCCAGATTTATCAGCAATAAACCAGC | | | |
| | | CAGCCGGAAGGGCCGAGCGCAGAAGTGGTCCTGCAACTTTATCCGCCT | | | |
| | | CCATCCAGTCTATTAATTGTTGCCGGGAAGCTAGAGTAAGTAGTTCGCC | | | |
| | | AGTTAATAGTTTGCGCAACGTTGTTGCCATTGCTACAGGCATCGTGGTG | | | |
| | | TCACGCTCGTCGTTTGGTATGGCTTCATTCAGCTCCGGTTCCCAACGAT | | | |
| | | CAAGGCGAGTTACATGATCCCCCATGTTGTGCAAAAAAGCGGTTAGCT | | | |
| | | CCTTCGGTCCTCCGATCGTTGTCAGAAGTAAGTTGGCCGCAGTGTTATC | | | |
| | | ACTCATGGTTATGGCAGCACTGCATAATTCTCTTACTGTCATGCCATCC | | | |
| | | GTAAGATGCTTTTCTGTGACTGGTGAGTACTCAACCAAGTCATTCTGAG | | | |
| | | AATAGTGTATGCGGCGACCGAGTTGCTCTTGCCCGGCGTCAATACGGG | | | |
| | | ATAATACCGCGCCACATAGCAGAACTTTAAAAGTGCTCATCATTGGAAA | | | |
| | | ACGTTCTTCGGGGCGAAAACTCTCAAGGATCTTACCGCTGTTGAGATCC | | | |
| | | AGTTCGATGTAACCCACTCGTGCACCCAACTGATCTTCAGCATCTTTTAC | | | |
| | | TTTCACCAGCGTTTCTGGGTGAGCAAAAACAGGAAGGCAAAATGCCGC | | | |
| | | AAAAAAGGGAATAAGGGCGACACGGAAATGTTGAATACTCATACTCTT | | | |
| | | CCTTTTTCAATATTATTGAAGCATTTATCAGGGTTATTGTCTCATGAGCG | | | |
| | | GATACATATTTGAATGTATTTAGAAAAATAAACAAATAGGGGTTCCGC | | | |
| | | GCACATTTCCCCGAAAAGTGCCACCTGACGTCTAAGAAACCATTATTAT | | | |
| | | CATGACATTAACCTATAAAAATAGGCGTATCACGAGGCCCTTTCGTCTC | | | |
| | | GCGCGTTTCGGTGATGACGGTGAAAACCTCTGACACATGCAGCTCCCG | | | |
| | | GAGACGGTCACAGCTTGTCTGTAAGCGGATGCCGGGAGCAGACAAGC | | | |
| | | CCGTCAGGGCGCGTCAGCGGGTGTTGGCGGGTGTCGGGGCTGGCTTA | | | |
| | | ACTATGCGGCATCAGAGCAGATTGTACTGAGAGTGCACCATATGCGGT | | | |
| | | GTGAAATACCGCACAGATGCGTAAGGAGAAAATACCGCATCAGGCGC | | | |
| | | CATTCGCCATTCAGGCTGCGCAACTGTTGGGAAGGGCGATCGGTGCGG | | | |
| | | GCCTCTTCGCTATTACGCCAGCTGGCGAAAGGGGGATGTGCTGCAAGG | | | |
| | | CGATTAAGTTGGGTAACGCCAGGGTTTTCCCAGTCACGACGTTGTAAA | | | |
| | | ACGACGGCCAGT | | | |
| CIS_pCMV_ | PLV10031 | GAATTCGAGCTTGCATGCCTGCAGGTCGTTACATAACTTACGGTAAATG | 359 | N/A | |
| R-U5- | | GCCCGCCTGGCTGACCGCCCAACGACCCCCGCCCATTGACGTCAATAAT | | | |
| PBS*- | | GACGTATGTTCCCATAGTAACGCCAATAGGGACTTTCCATTGACGTCAA | | | |
| IAP- | | TGGGTGGAGTATTTACGGTAAACTGCCCACTTGGCAGTACATCAAGTG | | | |
| 92L23_ | | TATCATATGCCAAGTACGCCCCCTATTGACGTCAATGACGGTAAATGGC | | | |
| EF1- | | CCGCCTGGCATTATGCCCAGTACATGACCTTATGGGACTTTCCTACTTG | | | |
| GFPai- | | GCAGTACATCTACGTATTAGTCATCGCTATTACCATGGTGATGCGGTTT | | | |
| LTR_v1 | | TGGCAGTACATCAATGGGCGTGGATAGCGGTTTGACTCACGGGGATTT | | | |
| | | CCAAGTCTCCACCCCATTGACGTCAATGGGAGTTTGTTTTGGCACCAAA | | | |
| | | ATCAACGGGACTTTCCAAAATGTCGTAACAACTCCGCCCCATTGACGCA | | | |
| | | AATGGGCGGTAGGCGTGTACGGTGGGAGGTCTATATAAGCAGAGCTC | | | |
| | | GTTTAGTGAACCGTCAGGGACGGGGTTTCGTTTTCTCTCTCTCTTGCTTC | | | |
| | | TCGCTCGCTCTTGCTTCTTGCACTCTGGCTCCTGAAGATGTAAGCAATA | | | |
| | | AAGTTTTGCCGCAGAAGATTCTGGTCTGTGGTGTTCTTCCTGGCCGGGC | | | |
| | | GTGAGAACGCGTCTAATAACAATTTAGCGACTAAACACATCACGAGAA | | | |
| | | AAAAACTCGGGACTGGCGCAAGGAAGATCCCTCATTCCAGAACCAGAA | | | |
| | | CTGCGGGTCGCGGTAATAAAGGTTCCCGTAAAGCAGACTGTTAAGAAG | | | |
| | | GATTCAACTGTATGAATTCAGAACTTTTCAGCTGGGGAACGAGAGTAC | | | |
| | | CAGTGAGTACAGCTTTACGAGGTAAGTCTGATCTTGAACTTTCTAAGGA | | | |
| | | AATTCAAGACAGTCTATCAGAAGTAAAGTGGAATATGTTTGGCCTTGA | | | |
| | | ATTTTTTCTGGTGTTAGGAGCCCTTTTGTTCCTTTTCACATGTTATCAAG | | | |
| | | TGATTAAGATAGGGCTGAAAATTCTAGAGGAAATTCAGGACAAGCTAT | | | |
| | | CAGAAGTAAAGCGGGGAGAGAGAGTAGGAGCAAAGAGAAAATATGG | | | |
| | | TACACAAAATAAGTATACAGGCCTTTCCAAGGGTCTTGAACCCGAGGA | | | |
| | | AAAGTTAAGGTTAGGTAGGAATACCTGGAGAGAGATTAGAAGAAAAA | | | |
| | | GAGGAAAAAGGGAAAAGAAGAAAGATCAATTAGCGGAGGTCTCTAG | | | |
| | | GAGATACTCGTCACTAGATGAGCTCAGGAAGCCAGCTCTTAGTAGTTC | | | |
| | | TGAAGCAGATGAAGAATTCTCCTCTGAGGAAACAGACTGGGAGGAAG | | | |
| | | AAGCAGCCCATTACCAGCCAGCTAATTGGTCAAGAAAAAAGCCAAAAG | | | |
| | | CGGCTGGCGAAGGCCAGTTTGCTGATTGGCCTCAGGGCAGTCGGCTTC | | | |
| | | AAGGTCCGCCCTATGCGGAGTCCCCGCCCTGCGTAGTGCGTCAGCAAT | | | |
| | | GCGCAGAGAGGCAGTGCGCAGAGAGGCAGTGCGCAGACTCATTCATT | | | |
| | | CCCAGAGAGGAACAAAGGAAAATACAACAGGCATTTCCGGTCTTTGAA | | | |
| | | GGAGCCGAGGGTGGGCGTGTCCACGCTCCGGTAGAATACTTACAAATT | | | |
| | | AAAGAAATTGCCGAGTCGGTCCGTAAATATGGAACCAATGCTAATTTT | | | |
| | | ACCTTGGTGCAGTTAGACAGGCTCGCCGGCATGGCACTAACTCCTGCT | | | |
| | | GACTGGCAAACGGTTGTAAAAGCCGCTCTCCCTAGTATGGGCAAATAT | | | |
| | | ATGGAATGGAGAGCGCTTTGGCACGAAGCTGCACAAGCGCAGGCCCG | | | |
| | | AGCAAACGCAGCTGCTTTGACTCCAGAGCAGAGAGATTGGACTTTTGA | | | |
| | | CTTGTTAACGGGTCAGGGAGCTTATTCTGCTGATCAGACAAACTACCAT | | | |
| | | TGGGGAGCTTATGCCCAGATTTCTTCCACGGCTATTAGGGCCTGGAAG | | | |
| | | GCGCTCTCTCGAGCAGGTGAAACCACTGGTCAGTTAACAAAGATAATC | | | |
| | | CAGGGACCTCAGGAATCCTTCTCAGATTTTGTGGCCAGAATGACAGAG | | | |
| | | GCAGCAGAGCGTATTTTTGGAGAGTCAGAGCAAGCTGCGCCTCTGATA | | | |
| | | GAACAGCTAATCTATGAGCAAGCCACAAAGGAGTGCCGAGCGGCCAT | | | |
| | | AGCCCCAAGAAAGAACAAAGGCTTACAAGACTGGCTCAGGGTCTGTCG | | | |
| | | AGAGCTTGGGGGACCTCTCAGCAATGCAGGTTTAGCGGCTGCCATCCT | | | |
| | | TCAATCCCAAAACCGCTCCATGGGCAGAAATAATCAGAGGACATGTTTT | | | |
| | | AACTGCGGAAAGCCTGGGCATTTTAAGAAAGATTGCAGAGCTCCAGAT | | | |
| | | AAACAGGGAGGGACTCTCACTCTTTGCTCTAAGTGTGGCAAGGGTTAT | | | |
| | | CATAGAGCTGACCAGTGTCGCTCTGTGAGGGATATAAAGGGCAGAGT | | | |
| | | CCTTCCCCCACCTGATAGTCAATCAGCTGATGTGCCAAAAAACGGGTCA | | | |
| | | TCGGGCCCTCGGTCCCAGGGCCCTCAAAGATATGGGAACCGGTTTGTC | | | |
| | | AGGACCCAGGAAGCAGTCAGAGAGGCGACCCAGGAAGACCCACAAG | | | |
| | | GGTGGACCTGCGTGCCGCCTCCGACTTCCTACTAATGCCTCAAATGAGT | | | |
| | | ATTCAGCCGGTGCCGGTGGAGCCTATACCATCCTTGCCCCCGGGAACC | | | |
| | | ATGGGCCTTATTCTCGGCCGGGGTTCACTCACCTTGCAGGGCTTAGTAG | | | |
| | | TCCACCCTGGAGTTATGGATTGTCAACATTCCCCTGAAATACAGGTCCT | | | |
| | | GTGCTCAAGCCCTAAAGGCGTTTTTTCTATTAGTAAAGGAGATAGGAT | | | |
| | | AGCTCAGCTGCTGCTCCTCCCTGATAATACCAGGGAGAAATTTGCAGG | | | |
| | | ACCTGAGATAAAGAAAATGGGCTCCTCAGGAAATGATTCTGCCTATTT | | | |
| | | GGTTGTATCTTTAAATGATAGACCTAAGCTCCGCCTTAAGATTAACGGA | | | |
| | | AAAGAGTTTGAAGGCATCCTTGATACCGGAGCAGATAAAAGTATAATT | | | |
| | | TCTACACATTGGTGGCCCAAAGCATGGCCCACCACAGAGTCATCTCATT | | | |
| | | CATTACAGGGCCTAGGATATCAATCATGTCCCACTATAAGCTCCATTGC | | | |
| | | CTTGACGTGGGAATCCTCTGAAGGACAGCAAGGGAAATTCATACCTTA | | | |
| | | TGTGCTCCCACTCCCGGTTAACCTCTGGGGAAGGGATATTATGCAGCAT | | | |
| | | TTGGGCCTTATTTTGTCCAATGAAAACGCCCCATCAGGAGGGTATTCAG | | | |
| | | CTAAAGCAAAAAATATCATGGCAAAGATGGGTTATAAAGAAGGAAAA | | | |
| | | GGGTTAGGACATCAAGAACAGGGAAGGATAGAGCCCATCTCACCTAAT | | | |
| | | GGAAACCAAGACAGACAGGGTCTGGGTTTTCCTTAGCGGCCATTGGG | | | |
| | | GCAGCACGACCCATACCATGGAAAACAGGGGACCCAGTGTGGGTTCCT | | | |
| | | CAATGGCACCTATCCTCTGAAAAACTAGAAGCTGTGATTCAACTGGTA | | | |
| | | GAGGAACAATTAAAACTAGGCCATATTGAACCCTCTACCTCACCTTGGA | | | |
| | | ATACTCCAATTTTTGTAATTAAGAAAAAGTCAGGAAAGTGGAGACTGC | | | |
| | | TCCATGACCTCAGAGCCATTAATGAGCAAATGAACTTATTTGGCCCAGT | | | |
| | | ACAGAGGGGTCTCCCTGTACTTTCCGCCTTACCACGTGGCTGGAATTTA | | | |
| | | ATTATTATAGATATTAAAGATTGTTTCTTTTCTATACCTTTGTGTCCAAG | | | |
| | | GGATAGGCCCAGATTTGCCTTTACCATCCCCTCTATTAATCACATGGAA | | | |
| | | CCTGATAAGAGGTATCAATGGAAGGTCTTACCACAGGGAATGTCCAAT | | | |
| | | AGTCCTACAATGTGCCAACTTTATGTGCAAGAAGCTCTTTTGCCAGTGA | | | |
| | | GGGAACAATTCCCCTCTTTAATTTTGCTCCTTTACATGGATGACATCCTC | | | |
| | | CTGTGCCATAAAGACCTTACCATGCTACAAAAGGCATATCCTTTTCTACT | | | |
| | | TAAAACTTTAAGTCAGTGGGGTTTACAGATAGCCACAGAAAAGGTCCA | | | |
| | | AATTTCTGATACAGGACAATTCTTGGGCTCTGTGGTGTCCCCAGATAAG | | | |
| | | ATTGTGCCCCAAAAGGTAGAGATAAGAAGAGATCACCTCCATACCTTA | | | |
| | | AATGATTTTCAAAAGCTGTTGGGAGATATTAATTGGCTCAGACCTTTTT | | | |
| | | TAAAGATTCCTTCCGCTGAGTTAAGGCCTTTGTTTAGTATTTTAGAAGG | | | |
| | | AGATCCTCATATCTCCTCCCCTAGGACTCTTACTCTAGCTGCTAACCAGG | | | |
| | | CCTTACAAAAGGTGGAAAAAGCCTTACAGAATGCACAATTACAACGTA | | | |
| | | TTGAGGATTCGCAGCCTTTCAGTTTGTGTGTCTTTAAGACAGCACAATT | | | |
| | | GCCAACTGCAGTTTTGTGGCAGAATGGGCCATTGTTGTGGATCCATCC | | | |
| | | AAACGTATCCCCAGCTAAAATAATAGATTGGTATCCTGATGCAATTGCA | | | |
| | | CAGCTTGCCCTTAAAGGTCTAAAAGCAGCAATCACCCACTTTGGGCAAA | | | |
| | | GTCCATATCTTTTAATTGTACCTTATACCGCTGCACAGGTTCAAACCTTG | | | |
| | | GCAGCCACATCTAATGATTGGGCAGTTTTAGTTACCTCCTTTTCAGGAA | | | |
| | | AAATAGATAACCATTATCCAAAACATCCAATCTTACAGTTTGCCCAAAA | | | |
| | | TCAATCTGTTGTGTTTCCACAAATAACAGTAAGAAACCCACTTAAAAAT | | | |
| | | GGGATTGTGGTATATACTGATGGATCAAAAACTGGCATAGGTGCCTAT | | | |
| | | GTGGCTAATGGTAAAGTGGTATCCAAACAATATAATGAAAATTCACCTC | | | |
| | | AAGTGGTAGAATGTTTAGTGGTCTTAGAAGTTTTAAAAACCTTTTTAGA | | | |
| | | ACCCCTTAATATTGTGTCAGATTCCTGTTATGTGGTTAATGCAGTAAATC | | | |
| | | TTTTAGAAGTGGCTGGAGTGATTAAGCCTTCCAGTAGAGTTGCCAATAT | | | |
| | | TTTTCAGCAGATACAATTAGTTTTGTTATCTAGAAGATTTCCTGTTTATA | | | |
| | | TTACTCATGTTAGAGCCCATTCAGGCCTACCTGGCCCCATGGCTCTGGG | | | |
| | | AAATAATTTGGCAGATAAGGCCACTAAAGTGGTGGCTGCTGCCCTATC | | | |
| | | ATCCCCGGTAGAGGCTGCAAGAAATTTTCATAACAATTTTCATGTGACG | | | |
| | | GCTGAAACATTACGCAGTCGTTTCTCCTTGACAAGAAAAGAAGCCCGT | | | |
| | | GACATTGTTACTCAATGTCAAAGCTGCTGTGAGTTCTTGCCAGTTCCTC | | | |
| | | ATGTGGGAATTAACCCACGCGGTATTCGACCTCTACAGGTCTGGCAAA | | | |
| | | TGGATGTTACACATGTTTCTTCCTTTGGAAAACTTCAATATCTCCATGTG | | | |
| | | TCCATTGACACATGTTCTGGCATCATGTTTGCTTCTCCATTAACCGGAGA | | | |
| | | AAAAGCCTCACATGTGATTCAACATTGCCTTGAGGCATGGAGTGCTTG | | | |
| | | GGGGAAACCCAGACTCCTTAAGACTGATAATGGACCAGCTTATACGTC | | | |
| | | TCAAAAATTCCAACAGTTCTGCCGTCAGATGGACGTGACCCACCTGACT | | | |
| | | GGACTTCCATACAACCCTCAAGGACAGGGTATTGTTGAGCGTGCGCAT | | | |
| | | CGCACCCTCAAAACCTATCTTATAAAACAGAAGAGGGGAACTTTTGAG | | | |
| | | GAGACTGTACCCCGAGCACCAAGAGTGTCGGTGTCTATGGCACTCTTT | | | |
| | | ACACTCAATTTTTTAAATATTGATGCTCATGGCCATACTGCGGCTGAAC | | | |
| | | GTCATTGTACAGAGCCAGATAGGCCCAATGAGATGGTTAAATGGAAAA | | | |
| | | ATGTCCTTGATAATAAATGGTATGGCCCGGATCCTATTTTGATAAGATC | | | |
| | | CAGGGGAGCTATCTGTGTTTTCCCACAGAATGAAAACAACCCATTTTGG | | | |
| | | ATACCAGAAAGACTCACCCGAAAAATCCAGACTGACCAAGGAAATACT | | | |
| | | AATGTCCCTCGTCTTGGTGATGTCCAGGGCGTCAATAATAAAAAGAGA | | | |
| | | GCAGCGTTGGGGGATAATGTCGACATTTCCACTCCCAATGACGGTGAT | | | |
| | | GTATAATGCTCAAGTAgaacaaacgacccaacacccgtgcgttttattctgtctttttat | | | |
| | | tgccgatcccccggccgctttacttgtacagctcgtccatgccgagagtgatcccggcggcggt | | | |
| | | cacgaactccagcaggaccatgtgatcgcgcttctcgttggggtctttgctcagggcggactg | | | |
| | | ggtgctcaggtaagtatcaaggttacaagacaggtttaaggagaccaatagaaactgggctt | | | |
| | | gtcgagacagagaagactcttgcgtttctgataggcacctattggtcttactgacatccacttt | | | |
| | | gcctttctctccacaggtagtggttgtcgggcagcagcacggggccgtcgccgatgggggtgt | | | |
| | | tctgctggtagtggtcggcgagctgcacgctgccgtcctcgatgttgtggcggatcttgaagtt | | | |
| | | caccttgatgccgttcttctgcttgtcggccatgatatagacgttgtggctgttgtagttgtac | | | |
| | | tccagcttgtgccccaggatgttgccgtcctccttgaagtcgatgcccttcagctcgatgcggt | | | |
| | | tcaccagggtgtcgccctcgaacttcacctcggcgcgggtcttgtagttgccgtcgtccttgaa | | | |
| | | gaagatggtgcgctcctggacgtagccttcgggcatggcggacttgaagaagtcgtgctgcttc | | | |
| | | atgtggtcggggtagcggctgaagcactgcacgccgtaggtcagggtggtcacgagggtgggcc | | | |
| | | agggcacgggcagcttgccggtggtgcagatgaacttcagggtcagcttgccgtaggtggca | | | |
| | | tcgccctcgccctcgccggacacgctgaacttgtggccgtttacgtcgccgtccagctcgacca | | | |
| | | ggatgggcaccaccccggtgaacagctcctcgcccttgctcaccatggtggctttaccaacag | | | |
| | | taccggaatgccaagcttgggtcctgtgttctggcggcaaacccgttgcgaaaaagaacgttc | | | |
| | | acggcgactactgcacttatatacggttctcccccaccctcgggaaaaaggcggagccagta | | | |
| | | cacgacatcactttcccagtttaccccgcgccaccttctctaggcaccggatcaattgccgacc | | | |
| | | cctccccccaacttctcggggactgtgggcgatgtgcgctctgcccTTCTCCTGCTTTTTT | | | |
| | | ACCACTAACTAGGAACTGGGTTTGGCCTTAATTCAGACAGCCTTGGCTC | | | |
| | | TGTCTGGACAGGTCCAGACAACTGACACCATTAACACTTTGTCAGCCTC | | | |
| | | AGTGACTACAGTCATAGATGAACAGGCCTCAGCTAATGTCAAGATACA | | | |
| | | GAGAGGTCTCATGCTGGTTAATCAACTCATAGATCTTGTCCAGATACAA | | | |
| | | CTAGATGTATTATGACAATTAACTCAGCTGGGATGTGAACAAAAGTTTC | | | |
| | | CGGGATTGTGTGTTATTTCCATTCAGTATGTTAAATTTACTAGGACAGC | | | |
| | | TAATTTGTCAAAAAGTCTTTTTCAGTATATGTTACAGAATTGGATGGCT | | | |
| | | GAATTTGAACAGATCCTTCGGGAATTGAGACTTCAGGTCAACTCCACG | | | |
| | | CGCTTGGACCTGTCGCTGACCAAAGGATTACCCAATTGGATCTCCTCAG | | | |
| | | CATTTTCCTTCTTTAAAAAATGGGTGGGATTAATATTATTTGGAGATAC | | | |
| | | ACTTTGCTGTGGATTAGTGTTGCTTCTTTGATTGGTCTGTAAGCTTAAG | | | |
| | | GCCTAAACTAGGAGAGACAAGGTGGTTATTGCCCAGGCGCTTGCAGG | | | |
| | | ACTAGAACATGGAGCTCCCCCTGATATATGGTTATCTATGCTTAGGCAA | | | |
| | | TAGGTCGCTGGCCACTCAGCTCTTACATCTCACGAGGCTAGACTCATTG | | | |
| | | CACGGGATGGAGTGAGTGTGCTTCAGCAGCCCGAGAGAGTTGCACGG | | | |
| | | CTAAGCACTGCAATGGAAAGGCTCTGCGGCATATATGAGCCTATTCTA | | | |
| | | GGGAGACATGTCATCTTTCATGAAGGTTCAGTGTCCTAGTTCCCTTCCC | | | |
| | | CCAGGCAAAACGACACGGGAGCAGGTCAGGGTTGCTCTGGGTAAAAG | | | |
| | | CCTGTGAGCCTAAGAGCTAATCCTGTACATGGCTCCTTTACCTACACAC | | | |
| | | TGGGGATTTGACCTCTATCTCCACTCTCATTAATATGGGTGGCCTATTTG | | | |
| | | CTCTTATTAAAAGAAAAGGGGGAGATGTTGGGAGCCGCGCCCACATTC | | | |
| | | GCCGTTACAAGATGGCGCTGACAGCTGTGTTCTAAGTGGTAAACAAAT | | | |
| | | AATCTGCGCATGTGCCGAGGGTGGTTCTTCACTCTATGTGCTCTGCCTT | | | |
| | | CCCCGTGACGTCAACTCGGCCGATGGGCTGCAGCCAATCAGGGAGTG | | | |
| | | ACACGTCCTAGGCGAAGGAGAATTCTCTTTAATAGGGACGGGGTTTTG | | | |
| | | TTTTCTCTCTCTCTTGCTTCTCGCTCGCTCTTGCTTCTTGCACTCTGGCTC | | | |
| | | CTGAAGATGTAAGCAATAAAGTTTTGCCGCAGAAGATTCTGGTCTGTG | | | |
| | | GTGTTCTTCCTGGCCGGGCGTGAGAACGCGTCTAATAACAGCGGCCGC | | | |
| | | AACAGGGGATCCAGACATGATAAGATACATTGATGAGTTTGGACAAAC | | | |
| | | CACAACTAGAATGCAGTGAAAAAAATGCTTTATTTGTGAAATTTGTGAT | | | |
| | | GCTATTGCTTTATTTGTAACCATTATAAGCTGCAATAAACAAGTTAACA | | | |
| | | ACAACAATTGCATTCATTTTATGTTTCAGGTTCAGGGGGAGGTGTGGG | | | |
| | | AGGTTTTTTCGGATCCTCTAGAGTCGACCTGCAGGCATGCAAGCTTGGC | | | |
| | | GTAATCATGGTCATAGCTGTTTCCTGTGTGAAATTGTTATCCGCTCACA | | | |
| | | ATTCCACACAACATACGAGCCGGAAGCATAAAGTGTAAAGCCTGGGGT | | | |
| | | GCCTAATGAGTGAGCTAACTCACATTAATTGCGTTGCGCTCACTGCCCG | | | |
| | | CTTTCCAGTCGGGAAACCTGTCGTGCCAGCTGCATTAATGAATCGGCCA | | | |
| | | ACGCGCGGGGAGAGGCGGTTTGCGTATTGGGCGCTCTTCCGCTTCCTC | | | |
| | | GCTCACTGACTCGCTGCGCTCGGTCGTTCGGCTGCGGCGAGCGGTATC | | | |
| | | AGCTCACTCAAAGGCGGTAATACGGTTATCCACAGAATCAGGGGATAA | | | |
| | | CGCAGGAAAGAACATGTGAGCAAAAGGCCAGCAAAAGGCCAGGAACC | | | |
| | | GTAAAAAGGCCGCGTTGCTGGCGTTTTTCCATAGGCTCCGCCCCCCTGA | | | |
| | | CGAGCATCACAAAAATCGACGCTCAAGTCAGAGGTGGCGAAACCCGA | | | |
| | | CAGGACTATAAAGATACCAGGCGTTTCCCCCTGGAAGCTCCCTCGTGC | | | |
| | | GCTCTCCTGTTCCGACCCTGCCGCTTACCGGATACCTGTCCGCCTTTCTC | | | |
| | | CCTTCGGGAAGCGTGGCGCTTTCTCATAGCTCACGCTGTAGGTATCTCA | | | |
| | | GTTCGGTGTAGGTCGTTCGCTCCAAGCTGGGCTGTGTGCACGAACCCC | | | |
| | | CCGTTCAGCCCGACCGCTGCGCCTTATCCGGTAACTATCGTCTTGAGTC | | | |
| | | CAACCCGGTAAGACACGACTTATCGCCACTGGCAGCAGCCACTGGTAA | | | |
| | | CAGGATTAGCAGAGCGAGGTATGTAGGCGGTGCTACAGAGTTCTTGA | | | |
| | | AGTGGTGGCCTAACTACGGCTACACTAGAAGGACAGTATTTGGTATCT | | | |
| | | GCGCTCTGCTGAAGCCAGTTACCTTCGGAAAAAGAGTTGGTAGCTCTT | | | |
| | | GATCCGGCAAACAAACCACCGCTGGTAGCGGTGGTTTTTTTGTTTGCAA | | | |
| | | GCAGCAGATTACGCGCAGAAAAAAAGGATCTCAAGAAGATCCTTTGAT | | | |
| | | CTTTTCTACGGGGTCTGACGCTCAGTGGAACGAAAACTCACGTTAAGG | | | |
| | | GATTTTGGTCATGAGATTATCAAAAAGGATCTTCACCTAGATCCTTTTA | | | |
| | | AATTAAAAATGAAGTTTTAAATCAATCTAAAGTATATATGAGTAAACTT | | | |
| | | GGTCTGACAGTTACCAATGCTTAATCAGTGAGGCACCTATCTCAGCGAT | | | |
| | | CTGTCTATTTCGTTCATCCATAGTTGCCTGACTCCCCGTCGTGTAGATAA | | | |
| | | CTACGATACGGGAGGGCTTACCATCTGGCCCCAGTGCTGCAATGATAC | | | |
| | | CGCGAGACCCACGCTCACCGGCTCCAGATTTATCAGCAATAAACCAGC | | | |
| | | CAGCCGGAAGGGCCGAGCGCAGAAGTGGTCCTGCAACTTTATCCGCCT | | | |
| | | CCATCCAGTCTATTAATTGTTGCCGGGAAGCTAGAGTAAGTAGTTCGCC | | | |
| | | AGTTAATAGTTTGCGCAACGTTGTTGCCATTGCTACAGGCATCGTGGTG | | | |
| | | TCACGCTCGTCGTTTGGTATGGCTTCATTCAGCTCCGGTTCCCAACGAT | | | |
| | | CAAGGCGAGTTACATGATCCCCCATGTTGTGCAAAAAAGCGGTTAGCT | | | |
| | | CCTTCGGTCCTCCGATCGTTGTCAGAAGTAAGTTGGCCGCAGTGTTATC | | | |
| | | ACTCATGGTTATGGCAGCACTGCATAATTCTCTTACTGTCATGCCATCC | | | |
| | | GTAAGATGCTTTTCTGTGACTGGTGAGTACTCAACCAAGTCATTCTGAG | | | |
| | | AATAGTGTATGCGGCGACCGAGTTGCTCTTGCCCGGCGTCAATACGGG | | | |
| | | ATAATACCGCGCCACATAGCAGAACTTTAAAAGTGCTCATCATTGGAAA | | | |
| | | ACGTTCTTCGGGGCGAAAACTCTCAAGGATCTTACCGCTGTTGAGATCC | | | |
| | | AGTTCGATGTAACCCACTCGTGCACCCAACTGATCTTCAGCATCTTTTAC | | | |
| | | TTTCACCAGCGTTTCTGGGTGAGCAAAAACAGGAAGGCAAAATGCCGC | | | |
| | | AAAAAAGGGAATAAGGGCGACACGGAAATGTTGAATACTCATACTCTT | | | |
| | | CCTTTTTCAATATTATTGAAGCATTTATCAGGGTTATTGTCTCATGAGCG | | | |
| | | GATACATATTTGAATGTATTTAGAAAAATAAACAAATAGGGGTTCCGC | | | |
| | | GCACATTTCCCCGAAAAGTGCCACCTGACGTCTAAGAAACCATTATTAT | | | |
| | | CATGACATTAACCTATAAAAATAGGCGTATCACGAGGCCCTTTCGTCTC | | | |
| | | GCGCGTTTCGGTGATGACGGTGAAAACCTCTGACACATGCAGCTCCCG | | | |
| | | GAGACGGTCACAGCTTGTCTGTAAGCGGATGCCGGGAGCAGACAAGC | | | |
| | | CCGTCAGGGCGCGTCAGCGGGTGTTGGCGGGTGTCGGGGCTGGCTTA | | | |
| | | ACTATGCGGCATCAGAGCAGATTGTACTGAGAGTGCACCATATGCGGT | | | |
| | | GTGAAATACCGCACAGATGCGTAAGGAGAAAATACCGCATCAGGCGC | | | |
| | | CATTCGCCATTCAGGCTGCGCAACTGTTGGGAAGGGCGATCGGTGCGG | | | |
| | | GCCTCTTCGCTATTACGCCAGCTGGCGAAAGGGGGATGTGCTGCAAGG | | | |
| | | CGATTAAGTTGGGTAACGCCAGGGTTTTCCCAGTCACGACGTTGTAAA | | | |
| | | ACGACGGCCAGT | | | |
| CIS_pCMV_ | PLV10022 | GAATTCGAGCTTGCATGCCTGCAGGTCGTTACATAACTTACGGTAAATG | 360 | N/A | |
| R-U5- | | GCCCGCCTGGCTGACCGCCCAACGACCCCCGCCCATTGACGTCAATAAT | | | |
| IAP- | | GACGTATGTTCCCATAGTAACGCCAATAGGGACTTTCCATTGACGTCAA | | | |
| 92L23- | | TGGGTGGAGTATTTACGGTAAACTGCCCACTTGGCAGTACATCAAGTG | | | |
| delPol_ | | TATCATATGCCAAGTACGCCCCCTATTGACGTCAATGACGGTAAATGGC | | | |
| EF1- | | CCGCCTGGCATTATGCCCAGTACATGACCTTATGGGACTTTCCTACTTG | | | |
| GFPai- | | GCAGTACATCTACGTATTAGTCATCGCTATTACCATGGTGATGCGGTTT | | | |
| LTR_v2 | | TGGCAGTACATCAATGGGCGTGGATAGCGGTTTGACTCACGGGGATTT | | | |
| | | CCAAGTCTCCACCCCATTGACGTCAATGGGAGTTTGTTTTGGCACCAAA | | | |
| | | ATCAACGGGACTTTCCAAAATGTCGTAACAACTCCGCCCCATTGACGCA | | | |
| | | AATGGGCGGTAGGCGTGTACGGTGGGAGGTCTATATAAGCAGAGCTG | | | |
| | | TTTTCTCTCTCTCTTGCTTCTCGCTCGCTCTTGCTTCTTGCACTCTGGCTC | | | |
| | | CTGAAGATGTAAGCAATAAAGTTTTGCCGCAGAAGATTCTGGTCTGTG | | | |
| | | GTGTTCTTCCTGGCCGGGCGTGAGAACGCGTCTAATAACAATTGGTGC | | | |
| | | CGAATTCCGGGACGAGAAAAAAACTCGGGACTGGCGCAAGGAAGATC | | | |
| | | CCTCATTCCAGAACCAGAACTGCGGGTCGCGGTAATAAAGGTTCCCGT | | | |
| | | AAAGCAGACTGTTAAGAAGGATTCAACTGTATGAATTCAGAACTTTTCA | | | |
| | | GCTGGGGAACGAGAGTACCAGTGAGTACAGCTTTACGAGGTAAGTCT | | | |
| | | GATCTTGAACTTTCTAAGGAAATTCAAGACAGTCTATCAGAAGTAAAGT | | | |
| | | GGAATATGTTTGGCCTTGAATTTTTTCTGGTGTTAGGAGCCCTTTTGTTC | | | |
| | | CTTTTCACATGTTATCAAGTGATTAAGATAGGGCTGAAAATTCTAGAGG | | | |
| | | AAATTCAGGACAAGCTATCAGAAGTAAAGCGGGGAGAGAGAGTAGGA | | | |
| | | GCAAAGAGAAAATATGGTACACAAAATAAGTATACAGGCCTTTCCAAG | | | |
| | | GGTCTTGAACCCGAGGAAAAGTTAAGGTTAGGTAGGAATACCTGGAG | | | |
| | | AGAGATTAGAAGAAAAAGAGGAAAAAGGGAAAAGAAGAAAGATCAA | | | |
| | | TTAGCGGAGGTCTCTAGGAGATACTCGTCACTAGATGAGCTCAGGAAG | | | |
| | | CCAGCTCTTAGTAGTTCTGAAGCAGATGAAGAATTCTCCTCTGAGGAA | | | |
| | | ACAGACTGGGAGGAAGAAGCAGCCCATTACCAGCCAGCTAATTGGTCA | | | |
| | | AGAAAAAAGCCAAAAGCGGCTGGCGAAGGCCAGTTTGCTGATTGGCC | | | |
| | | TCAGGGCAGTCGGCTTCAAGGTCCGCCCTATGCGGAGTCCCCGCCCTG | | | |
| | | CGTAGTGCGTCAGCAATGCGCAGAGAGGCAGTGCGCAGAGAGGCAGT | | | |
| | | GCGCAGACTCATTCATTCCCAGAGAGGAACAAAGGAAAATACAACAG | | | |
| | | GCATTTCCGGTCTTTGAAGGAGCCGAGGGTGGGCGTGTCCACGCTCCG | | | |
| | | GTAGAATACTTACAAATTAAAGAAATTGCCGAGTCGGTCCGTAAATAT | | | |
| | | GGAACCAATGCTAATTTTACCTTGGTGCAGTTAGACAGGCTCGCCGGC | | | |
| | | ATGGCACTAACTCCTGCTGACTGGCAAACGGTTGTAAAAGCCGCTCTCC | | | |
| | | CTAGTATGGGCAAATATATGGAATGGAGAGCGCTTTGGCACGAAGCT | | | |
| | | GCACAAGCGCAGGCCCGAGCAAACGCAGCTGCTTTGACTCCAGAGCA | | | |
| | | GAGAGATTGGACTTTTGACTTGTTAACGGGTCAGGGAGCTTATTCTGCT | | | |
| | | GATCAGACAAACTACCATTGGGGAGCTTATGCCCAGATTTCTTCCACGG | | | |
| | | CTATTAGGGCCTGGAAGGCGCTCTCTCGAGCAGGTGAAACCACTGGTC | | | |
| | | AGTTAACAAAGATAATCCAGGGACCTCAGGAATCCTTCTCAGATTTTGT | | | |
| | | GGCCAGAATGACAGAGGCAGCAGAGCGTATTTTTGGAGAGTCAGAGC | | | |
| | | AAGCTGCGCCTCTGATAGAACAGCTAATCTATGAGCAAGCCACAAAGG | | | |
| | | AGTGCCGAGCGGCCATAGCCCCAAGAAAGAACAAAGGCTTACAAGAC | | | |
| | | TGGCTCAGGGTCTGTCGAGAGCTTGGGGGACCTCTCAGCAATGCAGGT | | | |
| | | TTAGCGGCTGCCATCCTTCAATCCCAAAACCGCTCCATGGGCAGAAATA | | | |
| | | ATCAGAGGACATGTTTTAACTGCGGAAAGCCTGGGCATTTTAAGAAAG | | | |
| | | ATTGCAGAGCTCCAGATAAACAGGGAGGGACTCTCACTCTTTGCTCTA | | | |
| | | AGTGTGGCAAGGGTTATCATAGAGCTGACCAGTGTCGCTCTGTGAGGG | | | |
| | | ATATAAAGGGCAGAGTCCTTCCCCCACCTGATAGTCAATCAGCTGATGT | | | |
| | | GCCAAAAAACGGGTCATCGGGCCCTCGGTCCCAGGGCCCTCAAAGATA | | | |
| | | TGGGAACCGGTTTGTCAGGACCCAGGAAGCAGTCAGAGAGGCGACCC | | | |
| | | AGGAAGACCCACAAGGGTGGACCTGCGTGCCGCCTCCGACTTCCTACT | | | |
| | | AATGCCTCAAATGAGTATTCAGCCGGTGCCGGTGGAGCCTATACCATC | | | |
| | | CTTGCCCCCGGGAACCATGGGCCTTATTCTCGGCCGGGGTTCACTCACC | | | |
| | | TTGCAGGGCTTAGTAGTCCACCCTGGAGTTATGGATTGTCAACATTCCC | | | |
| | | CTGAAATACAGGTCCTGTGCTCAAGCCCTAAAGGCGTTTTTTCTATTAG | | | |
| | | TAAAGGAGATAGGATAGCTCAGCTGCTGCTCCTCCCTGATAATACCAG | | | |
| | | GGAGAAATTTGCAGGACCTGAGATAAAGAAAATGGGCTCCTCAGGAA | | | |
| | | ATGATTCTGCCTATTTGGTTGTATCTTTAAATGATAGACCTAAGCTCCGC | | | |
| | | CTTAAGATTAACGGAAAAGAGTTTGAAGGCATCCTTGATACCGGAGCA | | | |
| | | GATAAAAGTATAATTTCTACACATTGGTGGCCCAAAGCATGGCCCACCA | | | |
| | | CAGAGTCATCTCATTCATTACAGGGCCTAGGATATCAATCATGTCCCAC | | | |
| | | TATAAGCTCCATTGCCTTGACGTGGGAATCCTCTGAAGGACAGCAAGG | | | |
| | | GAAATTCATACCTTATGTGCTCCCACTCCCGGTTAACCTCTGGGGAAGG | | | |
| | | GATATTATGCAGCATTTGGGCCTTATTTTGTCCAATGAAAACGCCCCAT | | | |
| | | CAGGAGGGTATTCAGCTAAAGCAAAAAATATCATGGCAAAGATGGGTT | | | |
| | | ATAAAGAAGGAAAAGGGTTAGGACATCAAGAACAGGGAAGGATAGA | | | |
| | | GCCCATCTCACCTAATGGAAACCAAGACAGACAGGGTCTGGGTTTTCC | | | |
| | | TTAGCGTAATGCTCAAGTAgaacaaacgacccaacacccgtgcgttttattctgtcttt | | | |
| | | ttattgccgatcccccggccgctttacttgtacagctcgtccatgccgagagtgatcccggcgg | | | |
| | | cggtcacgaactccagcaggaccatgtgatcgcgcttctcgttggggtctttgctcagggcgg | | | |
| | | actgggtgctcaggtaagtatcaaggttacaagacaggtttaaggagaccaatagaaactgg | | | |
| | | gcttgtcgagacagagaagactcttgcgtttctgataggcacctattggtcttactgacatcca | | | |
| | | ctttgcctttctctccacaggtagtggttgtcgggcagcagcacggggccgtcgccgatgggg | | | |
| | | gtgttctgctggtagtggtcggcgagctgcacgctgccgtcctcgatgttgtggcggatcttga | | | |
| | | agttcaccttgatgccgttcttctgcttgtcggccatgatatagacgttgtggctgttgtagtt | | | |
| | | gtactccagcttgtgccccaggatgttgccgtcctccttgaagtcgatgcccttcagctcgatg | | | |
| | | cggttcaccagggtgtcgccctcgaacttcacctcggcgcgggtcttgtagttgccgtcgtcct | | | |
| | | tgaagaagatggtgcgctcctggacgtagccttcgggcatggcggacttgaagaagtcgtgctg | | | |
| | | cttcatgtggtcggggtagcggctgaagcactgcacgccgtaggtcagggtggtcacgagggtg | | | |
| | | ggccagggcacgggcagcttgccggtggtgcagatgaacttcagggtcagcttgccgtaggt | | | |
| | | ggcatcgccctcgccctcgccggacacgctgaacttgtggccgtttacgtcgccgtccagctcg | | | |
| | | accaggatgggcaccaccccggtgaacagctcctcgcccttgctcaccatggtggctttacca | | | |
| | | acagtaccggaatgccaagcttgggtcctgtgttctggcggcaaacccgttgcgaaaaagaa | | | |
| | | cgttcacggcgactactgcacttatatacggttctcccccaccctcgggaaaaaggcggagcc | | | |
| | | agtacacgacatcactttcccagtttaccccgcgccaccttctctaggcaccggatcaattgcc | | | |
| | | gacccctccccccaacttctcggggactgtgggcgatgtgcgctctgcccTTCTCCTGCTT | | | |
| | | TTTTACCACTAACTAGGAACTGGGTTTGGCCTTAATTCAGACAGCCTTG | | | |
| | | GCTCTGTCTGGACAGGTCCAGACAACTGACACCATTAACACTTTGTCAG | | | |
| | | CCTCAGTGACTACAGTCATAGATGAACAGGCCTCAGCTAATGTCAAGA | | | |
| | | TACAGAGAGGTCTCATGCTGGTTAATCAACTCATAGATCTTGTCCAGAT | | | |
| | | ACAACTAGATGTATTATGACAATTAACTCAGCTGGGATGTGAACAAAA | | | |
| | | GTTTCCGGGATTGTGTGTTATTTCCATTCAGTATGTTAAATTTACTAGGA | | | |
| | | CAGCTAATTTGTCAAAAAGTCTTTTTCAGTATATGTTACAGAATTGGAT | | | |
| | | GGCTGAATTTGAACAGATCCTTCGGGAATTGAGACTTCAGGTCAACTC | | | |
| | | CACGCGCTTGGACCTGTCGCTGACCAAAGGATTACCCAATTGGATCTCC | | | |
| | | TCAGCATTTTCCTTCTTTAAAAAATGGGTGGGATTAATATTATTTGGAG | | | |
| | | ATACACTTTGCTGTGGATTAGTGTTGCTTCTTTGATTGGTCTGTAAGCTT | | | |
| | | AAGGCCTAAACTAGGAGAGACAAGGTGGTTATTGCCCAGGCGCTTGC | | | |
| | | AGGACTAGAACATGGAGCTCCCCCTGATATATGGTTATCTATGCTTAGG | | | |
| | | CAATAGGTCGCTGGCCACTCAGCTCTTACATCTCACGAGGCTAGACTCA | | | |
| | | TTGCACGGGATGGAGTGAGTGTGCTTCAGCAGCCCGAGAGAGTTGCA | | | |
| | | CGGCTAAGCACTGCAATGGAAAGGCTCTGCGGCATATATGAGCCTATT | | | |
| | | CTAGGGAGACATGTCATCTTTCATGAAGGTTCAGTGTCCTAGTTCCCTT | | | |
| | | CCCCCAGGCAAAACGACACGGGAGCAGGTCAGGGTTGCTCTGGGTAA | | | |
| | | AAGCCTGTGAGCCTAAGAGCTAATCCTGTACATGGCTCCTTTACCTACA | | | |
| | | CACTGGGGATTTGACCTCTATCTCCACTCTCATTAATATGGGTGGCCTA | | | |
| | | TTTGCTCTTATTAAAAGAAAAGGGGGAGATGTTGGGAGCCGCGCCCAC | | | |
| | | ATTCGCCGTTACAAGATGGCGCTGACAGCTGTGTTCTAAGTGGTAAAC | | | |
| | | AAATAATCTGCGCATGTGCCGAGGGTGGTTCTTCACTCTATGTGCTCTG | | | |
| | | CCTTCCCCGTGACGTCAACTCGGCCGATGGGCTGCAGCCAATCAGGGA | | | |
| | | GTGACACGTCCTAGGCGAAGGAGAATTCTCTTTAATAGGGACGGGGTT | | | |
| | | TTGTTTTCTCTCTCTCTTGCTTCTCGCTCGCTCTTGCTTCTTGCACTCTGG | | | |
| | | CTCCTGAAGATGTAAGCAATAAAGTTTTGCCGCAGAAGATTCTGGTCT | | | |
| | | GTGGTGTTCTTCCTGGCCGGGCGTGAGAACGCGTCTAATAACAGCGGC | | | |
| | | CGCAACAGGGGATCCAGACATGATAAGATACATTGATGAGTTTGGACA | | | |
| | | AACCACAACTAGAATGCAGTGAAAAAAATGCTTTATTTGTGAAATTTGT | | | |
| | | GATGCTATTGCTTTATTTGTAACCATTATAAGCTGCAATAAACAAGTTA | | | |
| | | ACAACAACAATTGCATTCATTTTATGTTTCAGGTTCAGGGGGAGGTGTG | | | |
| | | GGAGGTTTTTTCGGATCCTCTAGAGTCGACCTGCAGGCATGCAAGCTT | | | |
| | | GGCGTAATCATGGTCATAGCTGTTTCCTGTGTGAAATTGTTATCCGCTC | | | |
| | | ACAATTCCACACAACATACGAGCCGGAAGCATAAAGTGTAAAGCCTGG | | | |
| | | GGTGCCTAATGAGTGAGCTAACTCACATTAATTGCGTTGCGCTCACTGC | | | |
| | | CCGCTTTCCAGTCGGGAAACCTGTCGTGCCAGCTGCATTAATGAATCG | | | |
| | | GCCAACGCGCGGGGAGAGGCGGTTTGCGTATTGGGCGCTCTTCCGCTT | | | |
| | | CCTCGCTCACTGACTCGCTGCGCTCGGTCGTTCGGCTGCGGCGAGCGG | | | |
| | | TATCAGCTCACTCAAAGGCGGTAATACGGTTATCCACAGAATCAGGGG | | | |
| | | ATAACGCAGGAAAGAACATGTGAGCAAAAGGCCAGCAAAAGGCCAGG | | | |
| | | AACCGTAAAAAGGCCGCGTTGCTGGCGTTTTTCCATAGGCTCCGCCCCC | | | |
| | | CTGACGAGCATCACAAAAATCGACGCTCAAGTCAGAGGTGGCGAAACC | | | |
| | | CGACAGGACTATAAAGATACCAGGCGTTTCCCCCTGGAAGCTCCCTCG | | | |
| | | TGCGCTCTCCTGTTCCGACCCTGCCGCTTACCGGATACCTGTCCGCCTTT | | | |
| | | CTCCCTTCGGGAAGCGTGGCGCTTTCTCATAGCTCACGCTGTAGGTATC | | | |
| | | TCAGTTCGGTGTAGGTCGTTCGCTCCAAGCTGGGCTGTGTGCACGAAC | | | |
| | | CCCCCGTTCAGCCCGACCGCTGCGCCTTATCCGGTAACTATCGTCTTGA | | | |
| | | GTCCAACCCGGTAAGACACGACTTATCGCCACTGGCAGCAGCCACTGG | | | |
| | | TAACAGGATTAGCAGAGCGAGGTATGTAGGCGGTGCTACAGAGTTCTT | | | |
| | | GAAGTGGTGGCCTAACTACGGCTACACTAGAAGGACAGTATTTGGTAT | | | |
| | | CTGCGCTCTGCTGAAGCCAGTTACCTTCGGAAAAAGAGTTGGTAGCTC | | | |
| | | TTGATCCGGCAAACAAACCACCGCTGGTAGCGGTGGTTTTTTTGTTTGC | | | |
| | | AAGCAGCAGATTACGCGCAGAAAAAAAGGATCTCAAGAAGATCCTTTG | | | |
| | | ATCTTTTCTACGGGGTCTGACGCTCAGTGGAACGAAAACTCACGTTAA | | | |
| | | GGGATTTTGGTCATGAGATTATCAAAAAGGATCTTCACCTAGATCCTTT | | | |
| | | TAAATTAAAAATGAAGTTTTAAATCAATCTAAAGTATATATGAGTAAAC | | | |
| | | TTGGTCTGACAGTTACCAATGCTTAATCAGTGAGGCACCTATCTCAGCG | | | |
| | | ATCTGTCTATTTCGTTCATCCATAGTTGCCTGACTCCCCGTCGTGTAGAT | | | |
| | | AACTACGATACGGGAGGGCTTACCATCTGGCCCCAGTGCTGCAATGAT | | | |
| | | ACCGCGAGACCCACGCTCACCGGCTCCAGATTTATCAGCAATAAACCA | | | |
| | | GCCAGCCGGAAGGGCCGAGCGCAGAAGTGGTCCTGCAACTTTATCCG | | | |
| | | CCTCCATCCAGTCTATTAATTGTTGCCGGGAAGCTAGAGTAAGTAGTTC | | | |
| | | GCCAGTTAATAGTTTGCGCAACGTTGTTGCCATTGCTACAGGCATCGTG | | | |
| | | GTGTCACGCTCGTCGTTTGGTATGGCTTCATTCAGCTCCGGTTCCCAAC | | | |
| | | GATCAAGGCGAGTTACATGATCCCCCATGTTGTGCAAAAAAGCGGTTA | | | |
| | | GCTCCTTCGGTCCTCCGATCGTTGTCAGAAGTAAGTTGGCCGCAGTGTT | | | |
| | | ATCACTCATGGTTATGGCAGCACTGCATAATTCTCTTACTGTCATGCCAT | | | |
| | | CCGTAAGATGCTTTTCTGTGACTGGTGAGTACTCAACCAAGTCATTCTG | | | |
| | | AGAATAGTGTATGCGGCGACCGAGTTGCTCTTGCCCGGCGTCAATACG | | | |
| | | GGATAATACCGCGCCACATAGCAGAACTTTAAAAGTGCTCATCATTGG | | | |
| | | AAAACGTTCTTCGGGGCGAAAACTCTCAAGGATCTTACCGCTGTTGAG | | | |
| | | ATCCAGTTCGATGTAACCCACTCGTGCACCCAACTGATCTTCAGCATCTT | | | |
| | | TTACTTTCACCAGCGTTTCTGGGTGAGCAAAAACAGGAAGGCAAAATG | | | |
| | | CCGCAAAAAAGGGAATAAGGGCGACACGGAAATGTTGAATACTCATA | | | |
| | | CTCTTCCTTTTTCAATATTATTGAAGCATTTATCAGGGTTATTGTCTCATG | | | |
| | | AGCGGATACATATTTGAATGTATTTAGAAAAATAAACAAATAGGGGTT | | | |
| | | CCGCGCACATTTCCCCGAAAAGTGCCACCTGACGTCTAAGAAACCATTA | | | |
| | | TTATCATGACATTAACCTATAAAAATAGGCGTATCACGAGGCCCTTTCG | | | |
| | | TCTCGCGCGTTTCGGTGATGACGGTGAAAACCTCTGACACATGCAGCT | | | |
| | | CCCGGAGACGGTCACAGCTTGTCTGTAAGCGGATGCCGGGAGCAGAC | | | |
| | | AAGCCCGTCAGGGCGCGTCAGCGGGTGTTGGCGGGTGTCGGGGCTGG | | | |
| | | CTTAACTATGCGGCATCAGAGCAGATTGTACTGAGAGTGCACCATATG | | | |
| | | CGGTGTGAAATACCGCACAGATGCGTAAGGAGAAAATACCGCATCAG | | | |
| | | GCGCCATTCGCCATTCAGGCTGCGCAACTGTTGGGAAGGGCGATCGGT | | | |
| | | GCGGGCCTCTTCGCTATTACGCCAGCTGGCGAAAGGGGGATGTGCTGC | | | |
| | | AAGGCGATTAAGTTGGGTAACGCCAGGGTTTTCCCAGTCACGACGTTG | | | |
| | | TAAAACGACGGCCAGT | | | |
| CIS_pCMV_ | PLV10024 | GAATTCGAGCTTGCATGCCTGCAGGTCGTTACATAACTTACGGTAAATG | 361 | N/A | |
| R-U5- | | GCCCGCCTGGCTGACCGCCCAACGACCCCCGCCCATTGACGTCAATAAT | | | |
| IAP- | | GACGTATGTTCCCATAGTAACGCCAATAGGGACTTTCCATTGACGTCAA | | | |
| 92L23_ | | TGGGTGGAGTATTTACGGTAAACTGCCCACTTGGCAGTACATCAAGTG | | | |
| EF1- | | TATCATATGCCAAGTACGCCCCCTATTGACGTCAATGACGGTAAATGGC | | | |
| GFPai- | | CCGCCTGGCATTATGCCCAGTACATGACCTTATGGGACTTTCCTACTTG | | | |
| LTR_v2 | | GCAGTACATCTACGTATTAGTCATCGCTATTACCATGGTGATGCGGTTT | | | |
| | | TGGCAGTACATCAATGGGCGTGGATAGCGGTTTGACTCACGGGGATTT | | | |
| | | CCAAGTCTCCACCCCATTGACGTCAATGGGAGTTTGTTTTGGCACCAAA | | | |
| | | ATCAACGGGACTTTCCAAAATGTCGTAACAACTCCGCCCCATTGACGCA | | | |
| | | AATGGGCGGTAGGCGTGTACGGTGGGAGGTCTATATAAGCAGAGCTG | | | |
| | | TTTTCTCTCTCTCTTGCTTCTCGCTCGCTCTTGCTTCTTGCACTCTGGCTC | | | |
| | | CTGAAGATGTAAGCAATAAAGTTTTGCCGCAGAAGATTCTGGTCTGTG | | | |
| | | GTGTTCTTCCTGGCCGGGCGTGAGAACGCGTCTAATAACAATTGGTGC | | | |
| | | CGAATTCCGGGACGAGAAAAAAACTCGGGACTGGCGCAAGGAAGATC | | | |
| | | CCTCATTCCAGAACCAGAACTGCGGGTCGCGGTAATAAAGGTTCCCGT | | | |
| | | AAAGCAGACTGTTAAGAAGGATTCAACTGTATGAATTCAGAACTTTTCA | | | |
| | | GCTGGGGAACGAGAGTACCAGTGAGTACAGCTTTACGAGGTAAGTCT | | | |
| | | GATCTTGAACTTTCTAAGGAAATTCAAGACAGTCTATCAGAAGTAAAGT | | | |
| | | GGAATATGTTTGGCCTTGAATTTTTTCTGGTGTTAGGAGCCCTTTTGTTC | | | |
| | | CTTTTCACATGTTATCAAGTGATTAAGATAGGGCTGAAAATTCTAGAGG | | | |
| | | AAATTCAGGACAAGCTATCAGAAGTAAAGCGGGGAGAGAGAGTAGGA | | | |
| | | GCAAAGAGAAAATATGGTACACAAAATAAGTATACAGGCCTTTCCAAG | | | |
| | | GGTCTTGAACCCGAGGAAAAGTTAAGGTTAGGTAGGAATACCTGGAG | | | |
| | | AGAGATTAGAAGAAAAAGAGGAAAAAGGGAAAAGAAGAAAGATCAA | | | |
| | | TTAGCGGAGGTCTCTAGGAGATACTCGTCACTAGATGAGCTCAGGAAG | | | |
| | | CCAGCTCTTAGTAGTTCTGAAGCAGATGAAGAATTCTCCTCTGAGGAA | | | |
| | | ACAGACTGGGAGGAAGAAGCAGCCCATTACCAGCCAGCTAATTGGTCA | | | |
| | | AGAAAAAAGCCAAAAGCGGCTGGCGAAGGCCAGTTTGCTGATTGGCC | | | |
| | | TCAGGGCAGTCGGCTTCAAGGTCCGCCCTATGCGGAGTCCCCGCCCTG | | | |
| | | CGTAGTGCGTCAGCAATGCGCAGAGAGGCAGTGCGCAGAGAGGCAGT | | | |
| | | GCGCAGACTCATTCATTCCCAGAGAGGAACAAAGGAAAATACAACAG | | | |
| | | GCATTTCCGGTCTTTGAAGGAGCCGAGGGTGGGCGTGTCCACGCTCCG | | | |
| | | GTAGAATACTTACAAATTAAAGAAATTGCCGAGTCGGTCCGTAAATAT | | | |
| | | GGAACCAATGCTAATTTTACCTTGGTGCAGTTAGACAGGCTCGCCGGC | | | |
| | | ATGGCACTAACTCCTGCTGACTGGCAAACGGTTGTAAAAGCCGCTCTCC | | | |
| | | CTAGTATGGGCAAATATATGGAATGGAGAGCGCTTTGGCACGAAGCT | | | |
| | | GCACAAGCGCAGGCCCGAGCAAACGCAGCTGCTTTGACTCCAGAGCA | | | |
| | | GAGAGATTGGACTTTTGACTTGTTAACGGGTCAGGGAGCTTATTCTGCT | | | |
| | | GATCAGACAAACTACCATTGGGGAGCTTATGCCCAGATTTCTTCCACGG | | | |
| | | CTATTAGGGCCTGGAAGGCGCTCTCTCGAGCAGGTGAAACCACTGGTC | | | |
| | | AGTTAACAAAGATAATCCAGGGACCTCAGGAATCCTTCTCAGATTTTGT | | | |
| | | GGCCAGAATGACAGAGGCAGCAGAGCGTATTTTTGGAGAGTCAGAGC | | | |
| | | AAGCTGCGCCTCTGATAGAACAGCTAATCTATGAGCAAGCCACAAAGG | | | |
| | | AGTGCCGAGCGGCCATAGCCCCAAGAAAGAACAAAGGCTTACAAGAC | | | |
| | | TGGCTCAGGGTCTGTCGAGAGCTTGGGGGACCTCTCAGCAATGCAGGT | | | |
| | | TTAGCGGCTGCCATCCTTCAATCCCAAAACCGCTCCATGGGCAGAAATA | | | |
| | | ATCAGAGGACATGTTTTAACTGCGGAAAGCCTGGGCATTTTAAGAAAG | | | |
| | | ATTGCAGAGCTCCAGATAAACAGGGAGGGACTCTCACTCTTTGCTCTA | | | |
| | | AGTGTGGCAAGGGTTATCATAGAGCTGACCAGTGTCGCTCTGTGAGGG | | | |
| | | ATATAAAGGGCAGAGTCCTTCCCCCACCTGATAGTCAATCAGCTGATGT | | | |
| | | GCCAAAAAACGGGTCATCGGGCCCTCGGTCCCAGGGCCCTCAAAGATA | | | |
| | | TGGGAACCGGTTTGTCAGGACCCAGGAAGCAGTCAGAGAGGCGACCC | | | |
| | | AGGAAGACCCACAAGGGTGGACCTGCGTGCCGCCTCCGACTTCCTACT | | | |
| | | AATGCCTCAAATGAGTATTCAGCCGGTGCCGGTGGAGCCTATACCATC | | | |
| | | CTTGCCCCCGGGAACCATGGGCCTTATTCTCGGCCGGGGTTCACTCACC | | | |
| | | TTGCAGGGCTTAGTAGTCCACCCTGGAGTTATGGATTGTCAACATTCCC | | | |
| | | CTGAAATACAGGTCCTGTGCTCAAGCCCTAAAGGCGTTTTTTCTATTAG | | | |
| | | TAAAGGAGATAGGATAGCTCAGCTGCTGCTCCTCCCTGATAATACCAG | | | |
| | | GGAGAAATTTGCAGGACCTGAGATAAAGAAAATGGGCTCCTCAGGAA | | | |
| | | ATGATTCTGCCTATTTGGTTGTATCTTTAAATGATAGACCTAAGCTCCGC | | | |
| | | CTTAAGATTAACGGAAAAGAGTTTGAAGGCATCCTTGATACCGGAGCA | | | |
| | | GATAAAAGTATAATTTCTACACATTGGTGGCCCAAAGCATGGCCCACCA | | | |
| | | CAGAGTCATCTCATTCATTACAGGGCCTAGGATATCAATCATGTCCCAC | | | |
| | | TATAAGCTCCATTGCCTTGACGTGGGAATCCTCTGAAGGACAGCAAGG | | | |
| | | GAAATTCATACCTTATGTGCTCCCACTCCCGGTTAACCTCTGGGGAAGG | | | |
| | | GATATTATGCAGCATTTGGGCCTTATTTTGTCCAATGAAAACGCCCCAT | | | |
| | | CAGGAGGGTATTCAGCTAAAGCAAAAAATATCATGGCAAAGATGGGTT | | | |
| | | ATAAAGAAGGAAAAGGGTTAGGACATCAAGAACAGGGAAGGATAGA | | | |
| | | GCCCATCTCACCTAATGGAAACCAAGACAGACAGGGTCTGGGTTTTCC | | | |
| | | TTAGCGGCCATTGGGGCAGCACGACCCATACCATGGAAAACAGGGGA | | | |
| | | CCCAGTGTGGGTTCCTCAATGGCACCTATCCTCTGAAAAACTAGAAGCT | | | |
| | | GTGATTCAACTGGTAGAGGAACAATTAAAACTAGGCCATATTGAACCC | | | |
| | | TCTACCTCACCTTGGAATACTCCAATTTTTGTAATTAAGAAAAAGTCAG | | | |
| | | GAAAGTGGAGACTGCTCCATGACCTCAGAGCCATTAATGAGCAAATGA | | | |
| | | ACTTATTTGGCCCAGTACAGAGGGGTCTCCCTGTACTTTCCGCCTTACC | | | |
| | | ACGTGGCTGGAATTTAATTATTATAGATATTAAAGATTGTTTCTTTTCTA | | | |
| | | TACCTTTGTGTCCAAGGGATAGGCCCAGATTTGCCTTTACCATCCCCTCT | | | |
| | | ATTAATCACATGGAACCTGATAAGAGGTATCAATGGAAGGTCTTACCA | | | |
| | | CAGGGAATGTCCAATAGTCCTACAATGTGCCAACTTTATGTGCAAGAA | | | |
| | | GCTCTTTTGCCAGTGAGGGAACAATTCCCCTCTTTAATTTTGCTCCTTTA | | | |
| | | CATGGATGACATCCTCCTGTGCCATAAAGACCTTACCATGCTACAAAAG | | | |
| | | GCATATCCTTTTCTACTTAAAACTTTAAGTCAGTGGGGTTTACAGATAG | | | |
| | | CCACAGAAAAGGTCCAAATTTCTGATACAGGACAATTCTTGGGCTCTGT | | | |
| | | GGTGTCCCCAGATAAGATTGTGCCCCAAAAGGTAGAGATAAGAAGAG | | | |
| | | ATCACCTCCATACCTTAAATGATTTTCAAAAGCTGTTGGGAGATATTAA | | | |
| | | TTGGCTCAGACCTTTTTTAAAGATTCCTTCCGCTGAGTTAAGGCCTTTGT | | | |
| | | TTAGTATTTTAGAAGGAGATCCTCATATCTCCTCCCCTAGGACTCTTACT | | | |
| | | CTAGCTGCTAACCAGGCCTTACAAAAGGTGGAAAAAGCCTTACAGAAT | | | |
| | | GCACAATTACAACGTATTGAGGATTCGCAGCCTTTCAGTTTGTGTGTCT | | | |
| | | TTAAGACAGCACAATTGCCAACTGCAGTTTTGTGGCAGAATGGGCCAT | | | |
| | | TGTTGTGGATCCATCCAAACGTATCCCCAGCTAAAATAATAGATTGGTA | | | |
| | | TCCTGATGCAATTGCACAGCTTGCCCTTAAAGGTCTAAAAGCAGCAATC | | | |
| | | ACCCACTTTGGGCAAAGTCCATATCTTTTAATTGTACCTTATACCGCTGC | | | |
| | | ACAGGTTCAAACCTTGGCAGCCACATCTAATGATTGGGCAGTTTTAGTT | | | |
| | | ACCTCCTTTTCAGGAAAAATAGATAACCATTATCCAAAACATCCAATCTT | | | |
| | | ACAGTTTGCCCAAAATCAATCTGTTGTGTTTCCACAAATAACAGTAAGA | | | |
| | | AACCCACTTAAAAATGGGATTGTGGTATATACTGATGGATCAAAAACT | | | |
| | | GGCATAGGTGCCTATGTGGCTAATGGTAAAGTGGTATCCAAACAATAT | | | |
| | | AATGAAAATTCACCTCAAGTGGTAGAATGTTTAGTGGTCTTAGAAGTTT | | | |
| | | TAAAAACCTTTTTAGAACCCCTTAATATTGTGTCAGATTCCTGTTATGTG | | | |
| | | GTTAATGCAGTAAATCTTTTAGAAGTGGCTGGAGTGATTAAGCCTTCCA | | | |
| | | GTAGAGTTGCCAATATTTTTCAGCAGATACAATTAGTTTTGTTATCTAG | | | |
| | | AAGATTTCCTGTTTATATTACTCATGTTAGAGCCCATTCAGGCCTACCTG | | | |
| | | GCCCCATGGCTCTGGGAAATAATTTGGCAGATAAGGCCACTAAAGTGG | | | |
| | | TGGCTGCTGCCCTATCATCCCCGGTAGAGGCTGCAAGAAATTTTCATAA | | | |
| | | CAATTTTCATGTGACGGCTGAAACATTACGCAGTCGTTTCTCCTTGACA | | | |
| | | AGAAAAGAAGCCCGTGACATTGTTACTCAATGTCAAAGCTGCTGTGAG | | | |
| | | TTCTTGCCAGTTCCTCATGTGGGAATTAACCCACGCGGTATTCGACCTC | | | |
| | | TACAGGTCTGGCAAATGGATGTTACACATGTTTCTTCCTTTGGAAAACT | | | |
| | | TCAATATCTCCATGTGTCCATTGACACATGTTCTGGCATCATGTTTGCTT | | | |
| | | CTCCATTAACCGGAGAAAAAGCCTCACATGTGATTCAACATTGCCTTGA | | | |
| | | GGCATGGAGTGCTTGGGGGAAACCCAGACTCCTTAAGACTGATAATG | | | |
| | | GACCAGCTTATACGTCTCAAAAATTCCAACAGTTCTGCCGTCAGATGGA | | | |
| | | CGTGACCCACCTGACTGGACTTCCATACAACCCTCAAGGACAGGGTATT | | | |
| | | GTTGAGCGTGCGCATCGCACCCTCAAAACCTATCTTATAAAACAGAAG | | | |
| | | AGGGGAACTTTTGAGGAGACTGTACCCCGAGCACCAAGAGTGTCGGT | | | |
| | | GTCTATGGCACTCTTTACACTCAATTTTTTAAATATTGATGCTCATGGCC | | | |
| | | ATACTGCGGCTGAACGTCATTGTACAGAGCCAGATAGGCCCAATGAGA | | | |
| | | TGGTTAAATGGAAAAATGTCCTTGATAATAAATGGTATGGCCCGGATC | | | |
| | | CTATTTTGATAAGATCCAGGGGAGCTATCTGTGTTTTCCCACAGAATGA | | | |
| | | AAACAACCCATTTTGGATACCAGAAAGACTCACCCGAAAAATCCAGAC | | | |
| | | TGACCAAGGAAATACTAATGTCCCTCGTCTTGGTGATGTCCAGGGCGT | | | |
| | | CAATAATAAAAAGAGAGCAGCGTTGGGGGATAATGTCGACATTTCCAC | | | |
| | | TCCCAATGACGGTGATGTATAATGCTCAAGTAgaacaaacgacccaacaccc | | | |
| | | gtgcgttttattctgtctttttattgccgatcccccggccgctttacttgtacagctcgtccat | | | |
| | | gccgagagtgatcccggcggcggtcacgaactccagcaggaccatgtgatcgcgcttctcgttg | | | |
| | | gggtctttgctcagggcggactgggtgctcaggtaagtatcaaggttacaagacaggtttaagg | | | |
| | | agaccaatagaaactgggcttgtcgagacagagaagactcttgcgtttctgataggcacctatt | | | |
| | | ggtcttactgacatccactttgcctttctctccacaggtagtggttgtcgggcagcagcacggg | | | |
| | | gccgtcgccgatgggggtgttctgctggtagtggtcggcgagctgcacgctgccgtcctcgatg | | | |
| | | ttgtggcggatcttgaagttcaccttgatgccgttcttctgcttgtcggccatgatatagacgt | | | |
| | | tgtggctgttgtagttgtactccagcttgtgccccaggatgttgccgtcctccttgaagtcgat | | | |
| | | gcccttcagctcgatgcggttcaccagggtgtcgccctcgaacttcacctcggcgcgggtcttg | | | |
| | | tagttgccgtcgtccttgaagaagatggtgcgctcctggacgtagccttcgggcatggcggact | | | |
| | | tgaagaagtcgtgctgcttcatgtggtcggggtagcggctgaagcactgcacgccgtaggtcag | | | |
| | | ggtggtcacgagggtgggccagggcacgggcagcttgccggtggtgcagatgaacttcagggt | | | |
| | | cagcttgccgtaggtggcatcgccctcgccctcgccggacacgctgaacttgtggccgtttacg | | | |
| | | tcgccgtccagctcgaccaggatgggcaccaccccggtgaacagctcctcgcccttgctcacc | | | |
| | | atggtggctttaccaacagtaccggaatgccaagcttgggtcctgtgttctggcggcaaaccc | | | |
| | | gttgcgaaaaagaacgttcacggcgactactgcacttatatacggttctcccccaccctcggg | | | |
| | | aaaaaggcggagccagtacacgacatcactttcccagtttaccccgcgccaccttctctaggc | | | |
| | | accggatcaattgccgacccctccccccaacttctcggggactgtgggcgatgtgcgctctgcc | | | |
| | | cTTCTCCTGCTTTTTTACCACTAACTAGGAACTGGGTTTGGCCTTAATTC | | | |
| | | AGACAGCCTTGGCTCTGTCTGGACAGGTCCAGACAACTGACACCATTA | | | |
| | | ACACTTTGTCAGCCTCAGTGACTACAGTCATAGATGAACAGGCCTCAGC | | | |
| | | TAATGTCAAGATACAGAGAGGTCTCATGCTGGTTAATCAACTCATAGAT | | | |
| | | CTTGTCCAGATACAACTAGATGTATTATGACAATTAACTCAGCTGGGAT | | | |
| | | GTGAACAAAAGTTTCCGGGATTGTGTGTTATTTCCATTCAGTATGTTAA | | | |
| | | ATTTACTAGGACAGCTAATTTGTCAAAAAGTCTTTTTCAGTATATGTTAC | | | |
| | | AGAATTGGATGGCTGAATTTGAACAGATCCTTCGGGAATTGAGACTTC | | | |
| | | AGGTCAACTCCACGCGCTTGGACCTGTCGCTGACCAAAGGATTACCCA | | | |
| | | ATTGGATCTCCTCAGCATTTTCCTTCTTTAAAAAATGGGTGGGATTAAT | | | |
| | | ATTATTTGGAGATACACTTTGCTGTGGATTAGTGTTGCTTCTTTGATTG | | | |
| | | GTCTGTAAGCTTAAGGCCTAAACTAGGAGAGACAAGGTGGTTATTGCC | | | |
| | | CAGGCGCTTGCAGGACTAGAACATGGAGCTCCCCCTGATATATGGTTA | | | |
| | | TCTATGCTTAGGCAATAGGTCGCTGGCCACTCAGCTCTTACATCTCACG | | | |
| | | AGGCTAGACTCATTGCACGGGATGGAGTGAGTGTGCTTCAGCAGCCCG | | | |
| | | AGAGAGTTGCACGGCTAAGCACTGCAATGGAAAGGCTCTGCGGCATA | | | |
| | | TATGAGCCTATTCTAGGGAGACATGTCATCTTTCATGAAGGTTCAGTGT | | | |
| | | CCTAGTTCCCTTCCCCCAGGCAAAACGACACGGGAGCAGGTCAGGGTT | | | |
| | | GCTCTGGGTAAAAGCCTGTGAGCCTAAGAGCTAATCCTGTACATGGCT | | | |
| | | CCTTTACCTACACACTGGGGATTTGACCTCTATCTCCACTCTCATTAATA | | | |
| | | TGGGTGGCCTATTTGCTCTTATTAAAAGAAAAGGGGGAGATGTTGGGA | | | |
| | | GCCGCGCCCACATTCGCCGTTACAAGATGGCGCTGACAGCTGTGTTCT | | | |
| | | AAGTGGTAAACAAATAATCTGCGCATGTGCCGAGGGTGGTTCTTCACT | | | |
| | | CTATGTGCTCTGCCTTCCCCGTGACGTCAACTCGGCCGATGGGCTGCAG | | | |
| | | CCAATCAGGGAGTGACACGTCCTAGGCGAAGGAGAATTCTCTTTAATA | | | |
| | | GGGACGGGGTTTTGTTTTCTCTCTCTCTTGCTTCTCGCTCGCTCTTGCTT | | | |
| | | CTTGCACTCTGGCTCCTGAAGATGTAAGCAATAAAGTTTTGCCGCAGAA | | | |
| | | GATTCTGGTCTGTGGTGTTCTTCCTGGCCGGGCGTGAGAACGCGTCTA | | | |
| | | ATAACAGCGGCCGCAACAGGGGATCCAGACATGATAAGATACATTGAT | | | |
| | | GAGTTTGGACAAACCACAACTAGAATGCAGTGAAAAAAATGCTTTATT | | | |
| | | TGTGAAATTTGTGATGCTATTGCTTTATTTGTAACCATTATAAGCTGCAA | | | |
| | | TAAACAAGTTAACAACAACAATTGCATTCATTTTATGTTTCAGGTTCAG | | | |
| | | GGGGAGGTGTGGGAGGTTTTTTCGGATCCTCTAGAGTCGACCTGCAGG | | | |
| | | CATGCAAGCTTGGCGTAATCATGGTCATAGCTGTTTCCTGTGTGAAATT | | | |
| | | GTTATCCGCTCACAATTCCACACAACATACGAGCCGGAAGCATAAAGT | | | |
| | | GTAAAGCCTGGGGTGCCTAATGAGTGAGCTAACTCACATTAATTGCGT | | | |
| | | TGCGCTCACTGCCCGCTTTCCAGTCGGGAAACCTGTCGTGCCAGCTGCA | | | |
| | | TTAATGAATCGGCCAACGCGCGGGGAGAGGCGGTTTGCGTATTGGGC | | | |
| | | GCTCTTCCGCTTCCTCGCTCACTGACTCGCTGCGCTCGGTCGTTCGGCT | | | |
| | | GCGGCGAGCGGTATCAGCTCACTCAAAGGCGGTAATACGGTTATCCAC | | | |
| | | AGAATCAGGGGATAACGCAGGAAAGAACATGTGAGCAAAAGGCCAGC | | | |
| | | AAAAGGCCAGGAACCGTAAAAAGGCCGCGTTGCTGGCGTTTTTCCATA | | | |
| | | GGCTCCGCCCCCCTGACGAGCATCACAAAAATCGACGCTCAAGTCAGA | | | |
| | | GGTGGCGAAACCCGACAGGACTATAAAGATACCAGGCGTTTCCCCCTG | | | |
| | | GAAGCTCCCTCGTGCGCTCTCCTGTTCCGACCCTGCCGCTTACCGGATA | | | |
| | | CCTGTCCGCCTTTCTCCCTTCGGGAAGCGTGGCGCTTTCTCATAGCTCAC | | | |
| | | GCTGTAGGTATCTCAGTTCGGTGTAGGTCGTTCGCTCCAAGCTGGGCT | | | |
| | | GTGTGCACGAACCCCCCGTTCAGCCCGACCGCTGCGCCTTATCCGGTAA | | | |
| | | CTATCGTCTTGAGTCCAACCCGGTAAGACACGACTTATCGCCACTGGCA | | | |
| | | GCAGCCACTGGTAACAGGATTAGCAGAGCGAGGTATGTAGGCGGTGC | | | |
| | | TACAGAGTTCTTGAAGTGGTGGCCTAACTACGGCTACACTAGAAGGAC | | | |
| | | AGTATTTGGTATCTGCGCTCTGCTGAAGCCAGTTACCTTCGGAAAAAGA | | | |
| | | GTTGGTAGCTCTTGATCCGGCAAACAAACCACCGCTGGTAGCGGTGGT | | | |
| | | TTTTTTGTTTGCAAGCAGCAGATTACGCGCAGAAAAAAAGGATCTCAA | | | |
| | | GAAGATCCTTTGATCTTTTCTACGGGGTCTGACGCTCAGTGGAACGAA | | | |
| | | AACTCACGTTAAGGGATTTTGGTCATGAGATTATCAAAAAGGATCTTCA | | | |
| | | CCTAGATCCTTTTAAATTAAAAATGAAGTTTTAAATCAATCTAAAGTATA | | | |
| | | TATGAGTAAACTTGGTCTGACAGTTACCAATGCTTAATCAGTGAGGCAC | | | |
| | | CTATCTCAGCGATCTGTCTATTTCGTTCATCCATAGTTGCCTGACTCCCC | | | |
| | | GTCGTGTAGATAACTACGATACGGGAGGGCTTACCATCTGGCCCCAGT | | | |
| | | GCTGCAATGATACCGCGAGACCCACGCTCACCGGCTCCAGATTTATCA | | | |
| | | GCAATAAACCAGCCAGCCGGAAGGGCCGAGCGCAGAAGTGGTCCTGC | | | |
| | | AACTTTATCCGCCTCCATCCAGTCTATTAATTGTTGCCGGGAAGCTAGA | | | |
| | | GTAAGTAGTTCGCCAGTTAATAGTTTGCGCAACGTTGTTGCCATTGCTA | | | |
| | | CAGGCATCGTGGTGTCACGCTCGTCGTTTGGTATGGCTTCATTCAGCTC | | | |
| | | CGGTTCCCAACGATCAAGGCGAGTTACATGATCCCCCATGTTGTGCAA | | | |
| | | AAAAGCGGTTAGCTCCTTCGGTCCTCCGATCGTTGTCAGAAGTAAGTTG | | | |
| | | GCCGCAGTGTTATCACTCATGGTTATGGCAGCACTGCATAATTCTCTTA | | | |
| | | CTGTCATGCCATCCGTAAGATGCTTTTCTGTGACTGGTGAGTACTCAAC | | | |
| | | CAAGTCATTCTGAGAATAGTGTATGCGGCGACCGAGTTGCTCTTGCCC | | | |
| | | GGCGTCAATACGGGATAATACCGCGCCACATAGCAGAACTTTAAAAGT | | | |
| | | GCTCATCATTGGAAAACGTTCTTCGGGGCGAAAACTCTCAAGGATCTTA | | | |
| | | CCGCTGTTGAGATCCAGTTCGATGTAACCCACTCGTGCACCCAACTGAT | | | |
| | | CTTCAGCATCTTTTACTTTCACCAGCGTTTCTGGGTGAGCAAAAACAGG | | | |
| | | AAGGCAAAATGCCGCAAAAAAGGGAATAAGGGCGACACGGAAATGTT | | | |
| | | GAATACTCATACTCTTCCTTTTTCAATATTATTGAAGCATTTATCAGGGT | | | |
| | | TATTGTCTCATGAGCGGATACATATTTGAATGTATTTAGAAAAATAAAC | | | |
| | | AAATAGGGGTTCCGCGCACATTTCCCCGAAAAGTGCCACCTGACGTCT | | | |
| | | AAGAAACCATTATTATCATGACATTAACCTATAAAAATAGGCGTATCAC | | | |
| | | GAGGCCCTTTCGTCTCGCGCGTTTCGGTGATGACGGTGAAAACCTCTG | | | |
| | | ACACATGCAGCTCCCGGAGACGGTCACAGCTTGTCTGTAAGCGGATGC | | | |
| | | CGGGAGCAGACAAGCCCGTCAGGGCGCGTCAGCGGGTGTTGGCGGGT | | | |
| | | GTCGGGGCTGGCTTAACTATGCGGCATCAGAGCAGATTGTACTGAGAG | | | |
| | | TGCACCATATGCGGTGTGAAATACCGCACAGATGCGTAAGGAGAAAAT | | | |
| | | ACCGCATCAGGCGCCATTCGCCATTCAGGCTGCGCAACTGTTGGGAAG | | | |
| | | GGCGATCGGTGCGGGCCTCTTCGCTATTACGCCAGCTGGCGAAAGGG | | | |
| | | GGATGTGCTGCAAGGCGATTAAGTTGGGTAACGCCAGGGTTTTCCCAG | | | |
| | | TCACGACGTTGTAAAACGACGGCCAGT | | | |
| CIS_pCMV_ | PLV100 | GAATTCGAGCTTGCATGCCTGCAGGTCGTTACATAACTTACGGTAAATG | 362 | N/A | |
| R-U5- | 32 | GCCCGCCTGGCTGACCGCCCAACGACCCCCGCCCATTGACGTCAATAAT | | | |
| PBS*- | | GACGTATGTTCCCATAGTAACGCCAATAGGGACTTTCCATTGACGTCAA | | | |
| IAP- | | TGGGTGGAGTATTTACGGTAAACTGCCCACTTGGCAGTACATCAAGTG | | | |
| 92L23_ | | TATCATATGCCAAGTACGCCCCCTATTGACGTCAATGACGGTAAATGGC | | | |
| EF1- | | CCGCCTGGCATTATGCCCAGTACATGACCTTATGGGACTTTCCTACTTG | | | |
| GFPai- | | GCAGTACATCTACGTATTAGTCATCGCTATTACCATGGTGATGCGGTTT | | | |
| LTR_V2 | | TGGCAGTACATCAATGGGCGTGGATAGCGGTTTGACTCACGGGGATTT | | | |
| | | CCAAGTCTCCACCCCATTGACGTCAATGGGAGTTTGTTTTGGCACCAAA | | | |
| | | ATCAACGGGACTTTCCAAAATGTCGTAACAACTCCGCCCCATTGACGCA | | | |
| | | AATGGGCGGTAGGCGTGTACGGTGGGAGGTCTATATAAGCAGAGCTG | | | |
| | | TTTTCTCTCTCTCTTGCTTCTCGCTCGCTCTTGCTTCTTGCACTCTGGCTC | | | |
| | | CTGAAGATGTAAGCAATAAAGTTTTGCCGCAGAAGATTCTGGTCTGTG | | | |
| | | GTGTTCTTCCTGGCCGGGCGTGAGAACGCGTCTAATAACAATTTAGCG | | | |
| | | ACTAAACACATCACGAGAAAAAAACTCGGGACTGGCGCAAGGAAGAT | | | |
| | | CCCTCATTCCAGAACCAGAACTGCGGGTCGCGGTAATAAAGGTTCCCG | | | |
| | | TAAAGCAGACTGTTAAGAAGGATTCAACTGTATGAATTCAGAACTTTTC | | | |
| | | AGCTGGGGAACGAGAGTACCAGTGAGTACAGCTTTACGAGGTAAGTC | | | |
| | | TGATCTTGAACTTTCTAAGGAAATTCAAGACAGTCTATCAGAAGTAAAG | | | |
| | | TGGAATATGTTTGGCCTTGAATTTTTTCTGGTGTTAGGAGCCCTTTTGTT | | | |
| | | CCTTTTCACATGTTATCAAGTGATTAAGATAGGGCTGAAAATTCTAGAG | | | |
| | | GAAATTCAGGACAAGCTATCAGAAGTAAAGCGGGGAGAGAGAGTAG | | | |
| | | GAGCAAAGAGAAAATATGGTACACAAAATAAGTATACAGGCCTTTCCA | | | |
| | | AGGGTCTTGAACCCGAGGAAAAGTTAAGGTTAGGTAGGAATACCTGG | | | |
| | | AGAGAGATTAGAAGAAAAAGAGGAAAAAGGGAAAAGAAGAAAGATC | | | |
| | | AATTAGCGGAGGTCTCTAGGAGATACTCGTCACTAGATGAGCTCAGGA | | | |
| | | AGCCAGCTCTTAGTAGTTCTGAAGCAGATGAAGAATTCTCCTCTGAGG | | | |
| | | AAACAGACTGGGAGGAAGAAGCAGCCCATTACCAGCCAGCTAATTGG | | | |
| | | TCAAGAAAAAAGCCAAAAGCGGCTGGCGAAGGCCAGTTTGCTGATTG | | | |
| | | GCCTCAGGGCAGTCGGCTTCAAGGTCCGCCCTATGCGGAGTCCCCGCC | | | |
| | | CTGCGTAGTGCGTCAGCAATGCGCAGAGAGGCAGTGCGCAGAGAGGC | | | |
| | | AGTGCGCAGACTCATTCATTCCCAGAGAGGAACAAAGGAAAATACAAC | | | |
| | | AGGCATTTCCGGTCTTTGAAGGAGCCGAGGGTGGGCGTGTCCACGCTC | | | |
| | | CGGTAGAATACTTACAAATTAAAGAAATTGCCGAGTCGGTCCGTAAAT | | | |
| | | ATGGAACCAATGCTAATTTTACCTTGGTGCAGTTAGACAGGCTCGCCG | | | |
| | | GCATGGCACTAACTCCTGCTGACTGGCAAACGGTTGTAAAAGCCGCTC | | | |
| | | TCCCTAGTATGGGCAAATATATGGAATGGAGAGCGCTTTGGCACGAAG | | | |
| | | CTGCACAAGCGCAGGCCCGAGCAAACGCAGCTGCTTTGACTCCAGAGC | | | |
| | | AGAGAGATTGGACTTTTGACTTGTTAACGGGTCAGGGAGCTTATTCTG | | | |
| | | CTGATCAGACAAACTACCATTGGGGAGCTTATGCCCAGATTTCTTCCAC | | | |
| | | GGCTATTAGGGCCTGGAAGGCGCTCTCTCGAGCAGGTGAAACCACTG | | | |
| | | GTCAGTTAACAAAGATAATCCAGGGACCTCAGGAATCCTTCTCAGATTT | | | |
| | | TGTGGCCAGAATGACAGAGGCAGCAGAGCGTATTTTTGGAGAGTCAG | | | |
| | | AGCAAGCTGCGCCTCTGATAGAACAGCTAATCTATGAGCAAGCCACAA | | | |
| | | AGGAGTGCCGAGCGGCCATAGCCCCAAGAAAGAACAAAGGCTTACAA | | | |
| | | GACTGGCTCAGGGTCTGTCGAGAGCTTGGGGGACCTCTCAGCAATGCA | | | |
| | | GGTTTAGCGGCTGCCATCCTTCAATCCCAAAACCGCTCCATGGGCAGA | | | |
| | | AATAATCAGAGGACATGTTTTAACTGCGGAAAGCCTGGGCATTTTAAG | | | |
| | | AAAGATTGCAGAGCTCCAGATAAACAGGGAGGGACTCTCACTCTTTGC | | | |
| | | TCTAAGTGTGGCAAGGGTTATCATAGAGCTGACCAGTGTCGCTCTGTG | | | |
| | | AGGGATATAAAGGGCAGAGTCCTTCCCCCACCTGATAGTCAATCAGCT | | | |
| | | GATGTGCCAAAAAACGGGTCATCGGGCCCTCGGTCCCAGGGCCCTCAA | | | |
| | | AGATATGGGAACCGGTTTGTCAGGACCCAGGAAGCAGTCAGAGAGGC | | | |
| | | GACCCAGGAAGACCCACAAGGGTGGACCTGCGTGCCGCCTCCGACTTC | | | |
| | | CTACTAATGCCTCAAATGAGTATTCAGCCGGTGCCGGTGGAGCCTATA | | | |
| | | CCATCCTTGCCCCCGGGAACCATGGGCCTTATTCTCGGCCGGGGTTCAC | | | |
| | | TCACCTTGCAGGGCTTAGTAGTCCACCCTGGAGTTATGGATTGTCAACA | | | |
| | | TTCCCCTGAAATACAGGTCCTGTGCTCAAGCCCTAAAGGCGTTTTTTCT | | | |
| | | ATTAGTAAAGGAGATAGGATAGCTCAGCTGCTGCTCCTCCCTGATAAT | | | |
| | | ACCAGGGAGAAATTTGCAGGACCTGAGATAAAGAAAATGGGCTCCTC | | | |
| | | AGGAAATGATTCTGCCTATTTGGTTGTATCTTTAAATGATAGACCTAAG | | | |
| | | CTCCGCCTTAAGATTAACGGAAAAGAGTTTGAAGGCATCCTTGATACC | | | |
| | | GGAGCAGATAAAAGTATAATTTCTACACATTGGTGGCCCAAAGCATGG | | | |
| | | CCCACCACAGAGTCATCTCATTCATTACAGGGCCTAGGATATCAATCAT | | | |
| | | GTCCCACTATAAGCTCCATTGCCTTGACGTGGGAATCCTCTGAAGGACA | | | |
| | | GCAAGGGAAATTCATACCTTATGTGCTCCCACTCCCGGTTAACCTCTGG | | | |
| | | GGAAGGGATATTATGCAGCATTTGGGCCTTATTTTGTCCAATGAAAAC | | | |
| | | GCCCCATCAGGAGGGTATTCAGCTAAAGCAAAAAATATCATGGCAAAG | | | |
| | | ATGGGTTATAAAGAAGGAAAAGGGTTAGGACATCAAGAACAGGGAAG | | | |
| | | GATAGAGCCCATCTCACCTAATGGAAACCAAGACAGACAGGGTCTGGG | | | |
| | | TTTTCCTTAGCGGCCATTGGGGCAGCACGACCCATACCATGGAAAACA | | | |
| | | GGGGACCCAGTGTGGGTTCCTCAATGGCACCTATCCTCTGAAAAACTA | | | |
| | | GAAGCTGTGATTCAACTGGTAGAGGAACAATTAAAACTAGGCCATATT | | | |
| | | GAACCCTCTACCTCACCTTGGAATACTCCAATTTTTGTAATTAAGAAAA | | | |
| | | AGTCAGGAAAGTGGAGACTGCTCCATGACCTCAGAGCCATTAATGAGC | | | |
| | | AAATGAACTTATTTGGCCCAGTACAGAGGGGTCTCCCTGTACTTTCCGC | | | |
| | | CTTACCACGTGGCTGGAATTTAATTATTATAGATATTAAAGATTGTTTCT | | | |
| | | TTTCTATACCTTTGTGTCCAAGGGATAGGCCCAGATTTGCCTTTACCATC | | | |
| | | CCCTCTATTAATCACATGGAACCTGATAAGAGGTATCAATGGAAGGTCT | | | |
| | | TACCACAGGGAATGTCCAATAGTCCTACAATGTGCCAACTTTATGTGCA | | | |
| | | AGAAGCTCTTTTGCCAGTGAGGGAACAATTCCCCTCTTTAATTTTGCTCC | | | |
| | | TTTACATGGATGACATCCTCCTGTGCCATAAAGACCTTACCATGCTACA | | | |
| | | AAAGGCATATCCTTTTCTACTTAAAACTTTAAGTCAGTGGGGTTTACAG | | | |
| | | ATAGCCACAGAAAAGGTCCAAATTTCTGATACAGGACAATTCTTGGGC | | | |
| | | TCTGTGGTGTCCCCAGATAAGATTGTGCCCCAAAAGGTAGAGATAAGA | | | |
| | | AGAGATCACCTCCATACCTTAAATGATTTTCAAAAGCTGTTGGGAGATA | | | |
| | | TTAATTGGCTCAGACCTTTTTTAAAGATTCCTTCCGCTGAGTTAAGGCCT | | | |
| | | TTGTTTAGTATTTTAGAAGGAGATCCTCATATCTCCTCCCCTAGGACTCT | | | |
| | | TACTCTAGCTGCTAACCAGGCCTTACAAAAGGTGGAAAAAGCCTTACA | | | |
| | | GAATGCACAATTACAACGTATTGAGGATTCGCAGCCTTTCAGTTTGTGT | | | |
| | | GTCTTTAAGACAGCACAATTGCCAACTGCAGTTTTGTGGCAGAATGGG | | | |
| | | CCATTGTTGTGGATCCATCCAAACGTATCCCCAGCTAAAATAATAGATT | | | |
| | | GGTATCCTGATGCAATTGCACAGCTTGCCCTTAAAGGTCTAAAAGCAG | | | |
| | | CAATCACCCACTTTGGGCAAAGTCCATATCTTTTAATTGTACCTTATACC | | | |
| | | GCTGCACAGGTTCAAACCTTGGCAGCCACATCTAATGATTGGGCAGTTT | | | |
| | | TAGTTACCTCCTTTTCAGGAAAAATAGATAACCATTATCCAAAACATCC | | | |
| | | AATCTTACAGTTTGCCCAAAATCAATCTGTTGTGTTTCCACAAATAACA | | | |
| | | GTAAGAAACCCACTTAAAAATGGGATTGTGGTATATACTGATGGATCA | | | |
| | | AAAACTGGCATAGGTGCCTATGTGGCTAATGGTAAAGTGGTATCCAAA | | | |
| | | CAATATAATGAAAATTCACCTCAAGTGGTAGAATGTTTAGTGGTCTTAG | | | |
| | | AAGTTTTAAAAACCTTTTTAGAACCCCTTAATATTGTGTCAGATTCCTGT | | | |
| | | TATGTGGTTAATGCAGTAAATCTTTTAGAAGTGGCTGGAGTGATTAAG | | | |
| | | CCTTCCAGTAGAGTTGCCAATATTTTTCAGCAGATACAATTAGTTTTGTT | | | |
| | | ATCTAGAAGATTTCCTGTTTATATTACTCATGTTAGAGCCCATTCAGGCC | | | |
| | | TACCTGGCCCCATGGCTCTGGGAAATAATTTGGCAGATAAGGCCACTA | | | |
| | | AAGTGGTGGCTGCTGCCCTATCATCCCCGGTAGAGGCTGCAAGAAATT | | | |
| | | TTCATAACAATTTTCATGTGACGGCTGAAACATTACGCAGTCGTTTCTCC | | | |
| | | TTGACAAGAAAAGAAGCCCGTGACATTGTTACTCAATGTCAAAGCTGC | | | |
| | | TGTGAGTTCTTGCCAGTTCCTCATGTGGGAATTAACCCACGCGGTATTC | | | |
| | | GACCTCTACAGGTCTGGCAAATGGATGTTACACATGTTTCTTCCTTTGG | | | |
| | | AAAACTTCAATATCTCCATGTGTCCATTGACACATGTTCTGGCATCATGT | | | |
| | | TTGCTTCTCCATTAACCGGAGAAAAAGCCTCACATGTGATTCAACATTG | | | |
| | | CCTTGAGGCATGGAGTGCTTGGGGGAAACCCAGACTCCTTAAGACTGA | | | |
| | | TAATGGACCAGCTTATACGTCTCAAAAATTCCAACAGTTCTGCCGTCAG | | | |
| | | ATGGACGTGACCCACCTGACTGGACTTCCATACAACCCTCAAGGACAG | | | |
| | | GGTATTGTTGAGCGTGCGCATCGCACCCTCAAAACCTATCTTATAAAAC | | | |
| | | AGAAGAGGGGAACTTTTGAGGAGACTGTACCCCGAGCACCAAGAGTG | | | |
| | | TCGGTGTCTATGGCACTCTTTACACTCAATTTTTTAAATATTGATGCTCA | | | |
| | | TGGCCATACTGCGGCTGAACGTCATTGTACAGAGCCAGATAGGCCCAA | | | |
| | | TGAGATGGTTAAATGGAAAAATGTCCTTGATAATAAATGGTATGGCCC | | | |
| | | GGATCCTATTTTGATAAGATCCAGGGGAGCTATCTGTGTTTTCCCACAG | | | |
| | | AATGAAAACAACCCATTTTGGATACCAGAAAGACTCACCCGAAAAATC | | | |
| | | CAGACTGACCAAGGAAATACTAATGTCCCTCGTCTTGGTGATGTCCAG | | | |
| | | GGCGTCAATAATAAAAAGAGAGCAGCGTTGGGGGATAATGTCGACAT | | | |
| | | TTCCACTCCCAATGACGGTGATGTATAATGCTCAAGTAgaacaaacgaccc | | | |
| | | aacacccgtgcgttttattctgtctttttattgccgatcccccggccgctttacttgtacagct | | | |
| | | cgtccatgccgagagtgatcccggcggcggtcacgaactccagcaggaccatgtgatcgcgctt | | | |
| | | ctcgttggggtctttgctcagggcggactgggtgctcaggtaagtatcaaggttacaagacagg | | | |
| | | tttaaggagaccaatagaaactgggcttgtcgagacagagaagactcttgcgtttctgataggc | | | |
| | | acctattggtcttactgacatccactttgcctttctctccacaggtagtggttgtcgggcagca | | | |
| | | gcacggggccgtcgccgatgggggtgttctgctggtagtggtcggcgagctgcacgctgccgtc | | | |
| | | ctcgatgttgtggcggatcttgaagttcaccttgatgccgttcttctgcttgtcggccatgata | | | |
| | | tagacgttgtggctgttgtagttgtactccagcttgtgccccaggatgttgccgtcctccttga | | | |
| | | agtcgatgcccttcagctcgatgcggttcaccagggtgtcgccctcgaacttcacctcggcgcg | | | |
| | | ggtcttgtagttgccgtcgtccttgaagaagatggtgcgctcctggacgtagccttcgggcatg | | | |
| | | gcggacttgaagaagtcgtgctgcttcatgtggtcggggtagcggctgaagcactgcacgccgt | | | |
| | | aggtcagggtggtcacgagggtgggccagggcacgggcagcttgccggtggtgcagatgaactt | | | |
| | | cagggtcagcttgccgtaggtggcatcgccctcgccctcgccggacacgctgaacttgtggcc | | | |
| | | gtttacgtcgccgtccagctcgaccaggatgggcaccaccccggtgaacagctcctcgccctt | | | |
| | | gctcaccatggtggctttaccaacagtaccggaatgccaagcttgggtcctgtgttctggcggc | | | |
| | | aaacccgttgcgaaaaagaacgttcacggcgactactgcacttatatacggttctcccccacc | | | |
| | | ctcgggaaaaaggcggagccagtacacgacatcactttcccagtttaccccgcgccaccttct | | | |
| | | ctaggcaccggatcaattgccgacccctccccccaacttctcggggactgtgggcgatgtgcg | | | |
| | | ctctgcccTTCTCCTGCTTTTTTACCACTAACTAGGAACTGGGTTTGGCCTT | | | |
| | | AATTCAGACAGCCTTGGCTCTGTCTGGACAGGTCCAGACAACTGACAC | | | |
| | | CATTAACACTTTGTCAGCCTCAGTGACTACAGTCATAGATGAACAGGCC | | | |
| | | TCAGCTAATGTCAAGATACAGAGAGGTCTCATGCTGGTTAATCAACTCA | | | |
| | | TAGATCTTGTCCAGATACAACTAGATGTATTATGACAATTAACTCAGCT | | | |
| | | GGGATGTGAACAAAAGTTTCCGGGATTGTGTGTTATTTCCATTCAGTAT | | | |
| | | GTTAAATTTACTAGGACAGCTAATTTGTCAAAAAGTCTTTTTCAGTATAT | | | |
| | | GTTACAGAATTGGATGGCTGAATTTGAACAGATCCTTCGGGAATTGAG | | | |
| | | ACTTCAGGTCAACTCCACGCGCTTGGACCTGTCGCTGACCAAAGGATTA | | | |
| | | CCCAATTGGATCTCCTCAGCATTTTCCTTCTTTAAAAAATGGGTGGGATT | | | |
| | | AATATTATTTGGAGATACACTTTGCTGTGGATTAGTGTTGCTTCTTTGAT | | | |
| | | TGGTCTGTAAGCTTAAGGCCTAAACTAGGAGAGACAAGGTGGTTATTG | | | |
| | | CCCAGGCGCTTGCAGGACTAGAACATGGAGCTCCCCCTGATATATGGT | | | |
| | | TATCTATGCTTAGGCAATAGGTCGCTGGCCACTCAGCTCTTACATCTCA | | | |
| | | CGAGGCTAGACTCATTGCACGGGATGGAGTGAGTGTGCTTCAGCAGCC | | | |
| | | CGAGAGAGTTGCACGGCTAAGCACTGCAATGGAAAGGCTCTGCGGCA | | | |
| | | TATATGAGCCTATTCTAGGGAGACATGTCATCTTTCATGAAGGTTCAGT | | | |
| | | GTCCTAGTTCCCTTCCCCCAGGCAAAACGACACGGGAGCAGGTCAGGG | | | |
| | | TTGCTCTGGGTAAAAGCCTGTGAGCCTAAGAGCTAATCCTGTACATGG | | | |
| | | CTCCTTTACCTACACACTGGGGATTTGACCTCTATCTCCACTCTCATTAA | | | |
| | | TATGGGTGGCCTATTTGCTCTTATTAAAAGAAAAGGGGGAGATGTTGG | | | |
| | | GAGCCGCGCCCACATTCGCCGTTACAAGATGGCGCTGACAGCTGTGTT | | | |
| | | CTAAGTGGTAAACAAATAATCTGCGCATGTGCCGAGGGTGGTTCTTCA | | | |
| | | CTCTATGTGCTCTGCCTTCCCCGTGACGTCAACTCGGCCGATGGGCTGC | | | |
| | | AGCCAATCAGGGAGTGACACGTCCTAGGCGAAGGAGAATTCTCTTTAA | | | |
| | | TAGGGACGGGGTTTTGTTTTCTCTCTCTCTTGCTTCTCGCTCGCTCTTGC | | | |
| | | TTCTTGCACTCTGGCTCCTGAAGATGTAAGCAATAAAGTTTTGCCGCAG | | | |
| | | AAGATTCTGGTCTGTGGTGTTCTTCCTGGCCGGGCGTGAGAACGCGTC | | | |
| | | TAATAACAGCGGCCGCAACAGGGGATCCAGACATGATAAGATACATTG | | | |
| | | ATGAGTTTGGACAAACCACAACTAGAATGCAGTGAAAAAAATGCTTTA | | | |
| | | TTTGTGAAATTTGTGATGCTATTGCTTTATTTGTAACCATTATAAGCTGC | | | |
| | | AATAAACAAGTTAACAACAACAATTGCATTCATTTTATGTTTCAGGTTC | | | |
| | | AGGGGGAGGTGTGGGAGGTTTTTTCGGATCCTCTAGAGTCGACCTGCA | | | |
| | | GGCATGCAAGCTTGGCGTAATCATGGTCATAGCTGTTTCCTGTGTGAA | | | |
| | | ATTGTTATCCGCTCACAATTCCACACAACATACGAGCCGGAAGCATAAA | | | |
| | | GTGTAAAGCCTGGGGTGCCTAATGAGTGAGCTAACTCACATTAATTGC | | | |
| | | GTTGCGCTCACTGCCCGCTTTCCAGTCGGGAAACCTGTCGTGCCAGCTG | | | |
| | | CATTAATGAATCGGCCAACGCGCGGGGAGAGGCGGTTTGCGTATTGG | | | |
| | | GCGCTCTTCCGCTTCCTCGCTCACTGACTCGCTGCGCTCGGTCGTTCGG | | | |
| | | CTGCGGCGAGCGGTATCAGCTCACTCAAAGGCGGTAATACGGTTATCC | | | |
| | | ACAGAATCAGGGGATAACGCAGGAAAGAACATGTGAGCAAAAGGCCA | | | |
| | | GCAAAAGGCCAGGAACCGTAAAAAGGCCGCGTTGCTGGCGTTTTTCCA | | | |
| | | TAGGCTCCGCCCCCCTGACGAGCATCACAAAAATCGACGCTCAAGTCA | | | |
| | | GAGGTGGCGAAACCCGACAGGACTATAAAGATACCAGGCGTTTCCCCC | | | |
| | | TGGAAGCTCCCTCGTGCGCTCTCCTGTTCCGACCCTGCCGCTTACCGGA | | | |
| | | TACCTGTCCGCCTTTCTCCCTTCGGGAAGCGTGGCGCTTTCTCATAGCTC | | | |
| | | ACGCTGTAGGTATCTCAGTTCGGTGTAGGTCGTTCGCTCCAAGCTGGG | | | |
| | | CTGTGTGCACGAACCCCCCGTTCAGCCCGACCGCTGCGCCTTATCCGGT | | | |
| | | AACTATCGTCTTGAGTCCAACCCGGTAAGACACGACTTATCGCCACTGG | | | |
| | | CAGCAGCCACTGGTAACAGGATTAGCAGAGCGAGGTATGTAGGCGGT | | | |
| | | GCTACAGAGTTCTTGAAGTGGTGGCCTAACTACGGCTACACTAGAAGG | | | |
| | | ACAGTATTTGGTATCTGCGCTCTGCTGAAGCCAGTTACCTTCGGAAAAA | | | |
| | | GAGTTGGTAGCTCTTGATCCGGCAAACAAACCACCGCTGGTAGCGGTG | | | |
| | | GTTTTTTTGTTTGCAAGCAGCAGATTACGCGCAGAAAAAAAGGATCTC | | | |
| | | AAGAAGATCCTTTGATCTTTTCTACGGGGTCTGACGCTCAGTGGAACG | | | |
| | | AAAACTCACGTTAAGGGATTTTGGTCATGAGATTATCAAAAAGGATCTT | | | |
| | | CACCTAGATCCTTTTAAATTAAAAATGAAGTTTTAAATCAATCTAAAGTA | | | |
| | | TATATGAGTAAACTTGGTCTGACAGTTACCAATGCTTAATCAGTGAGGC | | | |
| | | ACCTATCTCAGCGATCTGTCTATTTCGTTCATCCATAGTTGCCTGACTCC | | | |
| | | CCGTCGTGTAGATAACTACGATACGGGAGGGCTTACCATCTGGCCCCA | | | |
| | | GTGCTGCAATGATACCGCGAGACCCACGCTCACCGGCTCCAGATTTATC | | | |
| | | AGCAATAAACCAGCCAGCCGGAAGGGCCGAGCGCAGAAGTGGTCCTG | | | |
| | | CAACTTTATCCGCCTCCATCCAGTCTATTAATTGTTGCCGGGAAGCTAG | | | |
| | | AGTAAGTAGTTCGCCAGTTAATAGTTTGCGCAACGTTGTTGCCATTGCT | | | |
| | | ACAGGCATCGTGGTGTCACGCTCGTCGTTTGGTATGGCTTCATTCAGCT | | | |
| | | CCGGTTCCCAACGATCAAGGCGAGTTACATGATCCCCCATGTTGTGCAA | | | |
| | | AAAAGCGGTTAGCTCCTTCGGTCCTCCGATCGTTGTCAGAAGTAAGTTG | | | |
| | | GCCGCAGTGTTATCACTCATGGTTATGGCAGCACTGCATAATTCTCTTA | | | |
| | | CTGTCATGCCATCCGTAAGATGCTTTTCTGTGACTGGTGAGTACTCAAC | | | |
| | | CAAGTCATTCTGAGAATAGTGTATGCGGCGACCGAGTTGCTCTTGCCC | | | |
| | | GGCGTCAATACGGGATAATACCGCGCCACATAGCAGAACTTTAAAAGT | | | |
| | | GCTCATCATTGGAAAACGTTCTTCGGGGCGAAAACTCTCAAGGATCTTA | | | |
| | | CCGCTGTTGAGATCCAGTTCGATGTAACCCACTCGTGCACCCAACTGAT | | | |
| | | CTTCAGCATCTTTTACTTTCACCAGCGTTTCTGGGTGAGCAAAAACAGG | | | |
| | | AAGGCAAAATGCCGCAAAAAAGGGAATAAGGGCGACACGGAAATGTT | | | |
| | | GAATACTCATACTCTTCCTTTTTCAATATTATTGAAGCATTTATCAGGGT | | | |
| | | TATTGTCTCATGAGCGGATACATATTTGAATGTATTTAGAAAAATAAAC | | | |
| | | AAATAGGGGTTCCGCGCACATTTCCCCGAAAAGTGCCACCTGACGTCT | | | |
| | | AAGAAACCATTATTATCATGACATTAACCTATAAAAATAGGCGTATCAC | | | |
| | | GAGGCCCTTTCGTCTCGCGCGTTTCGGTGATGACGGTGAAAACCTCTG | | | |
| | | ACACATGCAGCTCCCGGAGACGGTCACAGCTTGTCTGTAAGCGGATGC | | | |
| | | CGGGAGCAGACAAGCCCGTCAGGGCGCGTCAGCGGGTGTTGGCGGGT | | | |
| | | GTCGGGGCTGGCTTAACTATGCGGCATCAGAGCAGATTGTACTGAGAG | | | |
| | | TGCACCATATGCGGTGTGAAATACCGCACAGATGCGTAAGGAGAAAAT | | | |
| | | ACCGCATCAGGCGCCATTCGCCATTCAGGCTGCGCAACTGTTGGGAAG | | | |
| | | GGCGATCGGTGCGGGCCTCTTCGCTATTACGCCAGCTGGCGAAAGGG | | | |
| | | GGATGTGCTGCAAGGCGATTAAGTTGGGTAACGCCAGGGTTTTCCCAG | | | |
| | | TCACGACGTTGTAAAACGACGGCCAGT | | | |

TABLE S5
Exemplary full-length driver and template construct elements

| | | SEQ ID | |
|---|---|---|---|
| name | sequence | NO: | length |
| MusD1 | TGTAGTCTCCCCTCCCCCAGCCTGAAACCTGCTTGCTCGGGGTGGAGCTTCCTGCTCATTCGTTCTGCCACGCCCACTGCTGGAACCTGCGGAGCCACACCCGT | 366 | 7478 |
| | GCACCTTTCTACTGGACCAGAGATTATTCGGCGGGAATCGGGTCCCCTCCCCCTTCCTTCATAACTGGTGTCGCAACAATAAAATTTGAGCTTTGATCAGTATG | | |
| | AAATTGCCTTAGCTCCGTTTCTTCTTTTGCCCCGTCTAGATTCCTCTCTTACAGCTCGAGCGGCCTTCTCAGTCGAACCGTTCACGTTGCGAGCTGCTGGCGGCC | | |
| | GCAACATTTTGGCGCCGGAACTGGGACCTGAAGAATGGCAGAGAGATGCTAAGAGGAACGCTGCATTGGAGCTCCACAGGAAAGGATCTTCGTATCGGACA | | |
| | TCGGAACAACGGACAGGTACACATGCTAGCGCTAGCTTAAAATTTCAGTTTTGTAAAGTGTTGCTAAGGATGCGGTAGGATACGAATTAAGCTTGAATCAGT | | |
| | GCTAACCCAACGCTGGTTCTGCTTGGGTCAGCAGCGTGTTAATCGGAACTAGAAACGGAAACAGGCAGGTTAGCCGCAGCTTTTTAGGAAGCTGCTTAGGTG | | |
| | GAAGAAGAAAGGGTTTAAAGTCATGGATCAGGCGGTTGCCAATAGTTTTCAGGAGTTGTTTCAGGCCAGAGGAGTAAGGCTCGAAGTACAATTAGTAAAAA | | |
| | ATTTTTTAGGTAAGATAGATAGCTGTTGCCCATGGTTCAAGGAAGAAGAAACACTAGATTGTGGAACCTGGGAGAAAGTTGGTGAGGCCTTAAAAATCACTC | | |
| | AGGCAGATAATTTTACCCTAGGCCTCTGGGCGCTCGTAAATGATGCAATAAAAGATGCCACTTCCCCAGGGCTAAGTTGCCCCCAGGCGGAGCTTGTGGTAT | | |
| | CTCAGGAGGAGTGCCTGTCAGAGAGGGCCTCCTCAGAAAAAGATCTTCTTAACTCAAAAATTGATAAATGTGGAAACTCGGATGAAAAACTGATTTTTAACA | | |
| | AAAATCACTCAGATAGAGGAGCTGCCCATTACCTTAATGAGAATTGGTCCTCTTGTGAATCTCCCGCTCCACCTGTAGTCCCCACTTCGGGAGGTGCCACTCAT | | |
| | AGGGACACACGACTAAGCGAGTTAGAGTTTGAGATTAAGCTTCAGAGGCTGACTAATGAGCTTCGGGAACTAAAAAAGATGTCAGAAGCGGAGAAGAGTA | | |
| | ACTCTTCTGTAGTTCACCAGGTGCCGCTAGAAAAGGTTGTGAGTCAGGCTCGTGGGAAAGGACAGAATATGTCTAATACGCTAGCCTTTCCGGTGGTCGAGG | | |
| | TAGTTGATCAACAAGATACTAGGGGCAGACATTACCAGACCTTAGATTTCAAGTTGATAAAAGAGTTAAAGGCGGCTGTTGTGCAATATGGCCCTTCAGCCCC | | |
| | GTTCACTCAAGCATTACTGGACACAGTTGTGGAGTCACACTTAACCCCTTTAGATTGGAAGACTCTTTCTAAGGCTACCCTGTCAGGAGGAGATTTTTTGCTTT | | |
| | GGGATTCTGAATGGCGAGACGCCAGTAAAAAAACTGCTGCTTCTAACGCTCAGGCTGGTAACTCAGACTGGGATAGCAACATGCTTTTAGGAGAGGGCCCTT | | |
| | ATGAGGGACAGACAAATCAGATTGATTTTCCCGTTGCAGTGTACGCGCAAATTGCGACGGCCGCACGCCGTGCTTGGGGAAGGTTGCCAGTCAAAGGAGAG | | |
| | ATTGGTGGAAGTTTAGCTAGCATTCGGCAGAGTTCTGATGAACCATATCAGGATTTTGTGGACAGGCTTTTGATTTCAGCTAGTAGAATTCTTGGAAGTCCGG | | |
| | ACACGGGAAGTCCTTTCGTTATGCAATTGGCTTATGAGAATGCTAATGCAATTTGCCGAGCTGCGATTCAACCGCATAAGGGAACGACAGATTTGGCGGGAT | | |
| | ATGTCCGCCTTTGCGCAGACATCGGGCCTTCCTGCGAGACCTTGCAGGGAACCCACGCGCAGGCAATGTTCTCAAGGAAACGAGGGAAAAATGTATGCTTTA | | |
| | AGTGTGGAGGTTTAGATCATTTTAGAATTGATTGTCCTCAGAACAAGGGTGCCGAGGTTAGACAAACAGGCCGTGGCCCAGGAATATGTCCCCGGTGTGGA | | |
| | AAGGGCCGCCACTGGGCGAAAGATTGTAAGCATAAAACGAGGGTTTTGAGCCGCCCGGTGCCGGGAAACGAGGAAAGGGGTCAGCCCCAGGCCCCGAGTT | | |
| | ACTCAAAGAAGACAGCTTATGGGGCTATAAATCTGCTGCCCAGCCAACAAGATCAGTTCTTGAGCTTGTCAGGTCAAACCCAGGAAATGCAAGACTGGACCT | | |
| | CTGTTCCACTGTCCATGTAGCATTAACCCCAGAAGTGGGAGTCCAAACTCTGCCTACCGGAGTTTTTGGACCACTACCTGTAGGAACCTGTGGTTTTCTCTTAG | | |
| | GACGAAGCAGTTCTATTGTAGAAGGCCTGCAGATTTATCCAGGTGTTATAAGTAATGATTATGAGGGAGAAATTAAAATCATAGCCGCTTGCCCTCGTGGTG | | |
| | CTATAACTATACCCGCTAATCAGAAAATTGCTCAACTTACTTTGATCCCTTTGCGCTGGTCACTATCTAAATTCTTTGAAAATGAAGAAGGACAGAATAACTTTG | | |
| | ACTCCCTTGGCGTAAATTGGGTGAAATCTATCACTAATCAGAGACCTAACCTTAAATTGATTCTTGATGGAAAAAGCTTTGAAGGATTAATAGATACCGGGGC | | |
| | CGATGTAACGATAATTAGAGGGCAGGACTGGCCCTCAAACTGGCCCCTGTCTGTTTCCTTGACTCACCTTCAAGGAATTGGTTATGCCAGTAACCCAAAACGT | | |
| | AGTTCCAAATTGCTAACCTGGAGAGATGAGGATGGAAAATCAGGAAATATTCAGCCGTATGTTATGCCAAATTTGCCTGTAACCCTGTGGGGAAGAGATCTG | | |
| | TTGTCACAGATGGGCGTTATCCTGTGCAGTTCTAAGGAGATGGTGACTGAACAGACGTTCAGGCAGGGACCCCTGCCTGATCGTGGACTAATAAAGAAGGG | | |
| | ACAGAAAATTAAGACCTTTGAGGATCTTAAACCCCACTCTAACGTGAGAGGTTTACAGTATTTTCAGTAGCGGCCACTGTCTTGCCTGCATCCCACGCCGAAA | | |
| | AAATTCAATGGCGTAATGATATTCCGGTATGGGTAGATCAGTGGTCCTTGCCTAAAGAGAAAATAGAGGCCGCTTCTTTGCTAGTGCAGGAGCAGTTAGAAG | | |
| | CAGGACATTTGGTGGAGTCTCACTCTCCCTGGAATACACCCATTTTCATTATCAGGAAGAAATCGGGAAAATGGAGACTATTGCAGGATTTAAGAAAGGTTA | | |
| | ATGAAACCATGGTACTTATGGGAACTTTACAACCGGGGCTTCCCTCCCCAGTAGCCATTCCTAAGGGATATTATAAGATTGTTATAGATTTGAAAGATTGTTTC | | |
| | TTTACCATCCCTTTGCATCCAAAGGATTGTGAGAGATTTGCTTTTAGTGTTCCTTCTGTAAATTTCAAGGAACCCATGAAAAGATATCATTGGACAGTTCTCCCG | | |
| | CAGGGCATGGCTAATAGTCCCACCTTATGTCAAAGGTTTGTGGCAAAGGCAATTCAGCCTGTTAGACAACAATGGCCAAATATTTACATCATCCATTTCACAG | | |
| | ATGATGTCCTGATGGCGGGAAAGGACCCCCAAGATTTGCTTTTGTGTTATGGAGACTTACAAAAGGCCCTGGCTGATAAGGGATTACAAATTGCTTCTGAAA | | |
| | AGATACAAACTCAGGATCCTTATAATTATTTGGGTTTTAGACTCACTGATCAAGCTGTTTTTCCCCAGAAAATTGTTATTCGTAGAGATAACTTAAGGACCTTA | | |
| | AATGATTTTCAAAAATTGTTAGGTGATATAAATTGGCTTCGCCCTTATCTAAAGCTTACTACAGGGGAGTTGAAACCTTTATTTGATATTCTTAAAGGGAGTTC | | |
| | TGATCCCACTTCCCCTAGATCCCTAACCTCAGAAGGGTTGCTGGCCTTACAGCTAGTGGAAAAGGCTATTGAAGAACAGTTTGTCACTTACATAGATTACTCCC | | |
| | TGCCGCTGCACCTGTTAATTTTTAATACGACTCATGTGCCTACGGGATTGCTATGGCAAAAATTTCCTATAATGTGGATACATTCGAGGATTTCTCCCAAACGT | | |
| | AATATCTTGCCATATCACGAAGCAGTGGCTCAGATGATTATCACTGGAAGAAGGCAGGCATTGACTTATTTTGGAAAGGAGCCAGATATCATTGTCCAGCCTT | | |
| | ACAGCGTGAGTCAGGACACTTGGCTGAAACAGCATAGTACAGATTGGTTGCTTGCACAATTAGGGTTTGAAGGAACTCTAGATAGCCACTACCCCCAAGATA | | |
| | GGTTGATAAAATTCTTAAATGTGCATGATATGATATTTCCTAAGATGACTTCCTTACAGCCTTTAAATAATGCTCTGTTGATTTTTACTGATGGCTCCTCTAAAG | | |
| | GGCGAGCTGGATATCTTATTAGTAATCAACAGGTTATCGTAGAGACTCCTGGTCTCTCGGCTCAGCTCGCCGAATTAACAGCAGTACTGAAGGTTTTTCAGTC | | |
| | TGTGCATGAGGCTTTTAATATTTTTACTGACAGTTTATATGTTGCTCAGTCAGTACCCTTACTGGAAACCTGTGGTACGTTTAACTTCAATACGCCGTCAGGATC | | |
| | TTTATTTTCAGAATTACAAAACATCATTCTCGCCCGGAAAAATCCGTTTTATATTGGCCACATACGGTCTCACTCTGGTCTTCCTGGACCTCTGGCAGAGGGTA | | |
| | ATGATCGCATTGACAGAGCTCTAATAGGAGAAGCCTTAGTTTCAGATCGGGTTGCTTTGGCCCAACGTGATCACGAAAGGTTTCATCTTTCTAGCCATACCCT | | |
| | AAGGCTCCGACATAAGATCACAAAGGAGCAAGCGAGAATGATCGTAAAACAATGTCCTAAATGTATTACTTTATCTCCAGTGCCTCATCTAGGAGTTAATCCT | | |
| | AGAGGCCTTATGCCTAATCATATTTGGCAAATGGATATAACCCATTATGCAGAATTTGGAAAACTAAAATATATACATGTTTGCATTGATACTTGTTCAGGATT | | |
| | TCTTTTTGCTTCTCTGCATACAGGAGAAGCTTCAAAAAACGTAATTGATCATTGCCTACAAGCATTTAATGCCATGGGATTGCCTAAACTTATTAAGACAGACA | | |
| | ATGGGCCATCTTATTCCAGTAAAAACTTTATTTCATTCTGTAAAGAATTCGGTATTAATCATAAAACTGGAATTCCTTACAACCCCATGGGACAAGGAATAGTT | | |
| | GAACGTGCTCATCGCACCTTAAAGAATTGGCTTTTTAAGACAAAAGAGGGTCAGCTATATCCCCCAAGGTCACCAAAGGCCCACCTTGCCTTCACTTTATTTGT | | |
| | CCTAAATTTCTTGCACACCGATATCAAGGGCCAGTCTGCAGCGGATCGCCACTGGCATCCAGTTACTTCTAATTCTTATGCATTGGTAAAATGGAAGGACCCCC | | |
| | TGACTAATGAATGGAAGGGTCCAGATCCAGTTCTAATTTGGGGTAGGGGCTCAGTTTGTGTTTTTTCACGAGATGAAGATGGAGCGCGGTGGCTGCCAGAG | | |
| | AGATTAATTCGTCAGATGAACACAGATTCTGACTCTTCTGGTAAGTATCATTCTAAAGACTAAAATTCCTTTTGTGCTTAAAATTCAGCTGAGAGCAACAGCTC | | |
| | TCAAAGCTGTTTGTGTTCTCCAGCTACTCTCTGAACCAGCTCCCGACAGGAGGCCGGAGACTAGCCTCAGCTTTACAATTTGCATTTAAATAAAGTACCTAGAC | | |
| | TTCCCCGAAAGAAGTTCTGCTTTCCTACTTTCTCACTGTCTTTCAAGATTTTGTCTTTCAAGCAGGTAAATCAACATTCCCGAGGCGGACCAGCGGATGTGCATC | | |
| | CCCGCCCCCCTAGAGCACACAGGCGGCAGCTGTTACCCCCAGTCTCAGGACATTTCCAGCATGTGGCTTTCAGTCTGAGTTAAAAATTTAGGTTTACCTAGAG | | |
| | GGCTAGAAGAGTAGATTTTTCTATATCAATAAAGATTGGTTTTTATTTTGGTAGACAGGCTTAGCCCCTTAGCTGACCTCTGGCTTTTCACCCTTGCTGTTACTG | | |
| | CAAGGTGTCCTTAGCTCAATAGGCTGTGGAAAAAACAGGGATGAGGAGGAACGACTTCCAGCTCCTATTTTACCCACAAATCGTGGTGTTATTAACGACATA | | |
| | ATTCTTGCTTAGGCTTTGCTAATTCTGAGGTTGATAATTCTCCTTTAGGAGCTGCACAGCACTCAGAACTGTGCATACTGGTTTGTGATTGTACAAATTCAGTAT | | |
| | GGGCACCGCTTGGTGCAGAGATACTTACTGCAAGGGAAGGTCCGGCTTGACCATTTCTGAGTTTCCTGTGAGATAAACCCGGTTTGAAAGAGGTTGGTACCA | | |
| | AATTTTGGTTAAAAATAAAAAATATTCTCCGGCTCTACCTCGCCTCCCCAAAAGGTACCGAGAGCCACATGTGTGGGTTTTACCCACGGGAGGAATCGGGTCC | | |
| | ATGTCCACCCAAGCCAAGGTTAAAAGCCCACTCATCTACGGATGAGAAAATCATTTGATCACCTCAGTTAAGCGTTGCCTTATTTAACTTAATTAATAGGGGG | | |
| | GAGAGAGATTGGAGACGTACTATTGAAAGGGCAAGCCTTTCACTGCCTCCCACCCAAATAAAAAAGCCAATTGGCCTTGTACTACAAGAGCCGGTCACTCCTT | | |
| | CTCCCTGTTTCCCACCTATCTTCCAAAAATGCGGAGGAATTCAACTTAGTGCTATTTTCACATCGTTCAGTCAAACTTAGCCAGAGTTCCAACGCCCTACTTAAA | | |
| | ATTCAACTAGAAAGTTACCTACCAAGTACTAATTAGCATTATAAAGTCAGAGTCTGCAGCTCCAGGCCTTTCAGTTGTTTACTAGAAAGGACAGTCTTAAGCCA | | |
| | GATACAGTTTACCATAAGAAAGGTTAAAGAATCCCAGTGAAGCAAGTTTTTTCTTTAGCCCTAGATTCCAGGCAGAACTATTGAGCATAGATAATTTTCCCCCC | | |
| | TCAGGCCAGCTTTTTCCTTTTTTTTATTTTGTTAATAATAGGGAGGAGATGTAGTCTCCCCTCCCCCAGCCTGAAACCTGCTTGCTCGGGGTGGAGCTTCCTGCT | | |
| | CATTCGTTCTGCCACGCCCACTGCTGGAACCTGCGGAGCCACACCCGTGCACCTTTCTACTGGACCAGAGATTATTCGGCGGGAATCGGGTCCCCTCCCCCCTT | | |
| | CCTTCATAACTGGTGTCGCAACAATAAAATTTGAGCTTTGATCAGTATGAAATTGCCTTAGCTCCGTTTCTTCTTTTGCCCCGTCTAGATTCCTCTCTTACAGCTC | | |
| | GAGCGGCCTTCTCAGTCGAACCGTTCACGTTGCGAGCTGCTGGCGGCCGCAACA | | |
| MusD2 | TGTAGTCTCCCCTCCCCCAGCCTGAAACCTGCTTGCTCGGGGTGGAGCTTCCTGCTCATTCGTTCTGCCACGCCCACTGCTGGAACCTGCGGAGCCACACCCGT | 367 | 7477 |
| | GCACCTTTCTACTGGACCAGAGATTATTCGGCGGGAATCGGGTCCCCTCCCCCTTCCTTCATAACTGGTGTCGCAACAATAAAATTTGAGCTTTGATCAGTATG | | |
| | AAATTGCCTTAGCTCCGTTTCTTCTTTTGCCCCGTCTAGATTCCTCTCTTACAGCTCGAGCGGCCTTCTCAGTCGAACCGTTCACGTTGCGAGCTGCTGGCGGCC | | |
| | GCAACATTTTGGCGCCGGAACTGGGACCTGAAGAATGGCAGAGAGATGCTAAGAGGAACGCTGCATTGGAGCTCCACAGGAAAGGATCTTCGTATCGGACA | | |
| | TCGGAGCAACGGACAGGTACACATGCTAGCGCTAGCTTAAAATTTCAGTTTTGTAAAGTGTTGCTAAGGATGCGGTAGGATACGAATTAAGCTTGAATCAGT | | |
| | GCTAACCCAACGCTGGTTCTGCTTGGGTCAGCAGCGTGTTAATCGGAACTAGAAACGGAAACAGGCAGGTTAGCCGCAGCTTTTTAGGAAGCTGCTTAGGTG | | |
| | GAAGAAGAAAGGGTTTAAAGTCATGGATCAGGCGGTTGCCAATAGTTTTCAGGAGTTGTTTCAGGCCAGAGGAGTAAGGCTCGAAGTACAATTAGTAAAAA | | |
| | ATTTTTTAGGTAAGATAGATAGCTGTTGCCCATGGTTCAAGGAAGAAGAAACACTAGATTGTGGAACCTGGGAGAAAGTTGGTGAGGCCTTAAAAATCACTC | | |
| | AGGCAGATAATTTTACCCTAGGCCTCTGGGCGCTCGTAAATGATGCAATAAAAGATGCCACTTCCCCAGGGCTAAGTTGCCCCCAGGCGGAGCTTGTGGTAT | | |
| | CTCAGGAGGAGTGCCTGTCAGAGAGGGCCTCCTCAGAAAAAGATCTTCTTAACTCAAAAATTGATAAATGTGGAAACTCGGATGAAAAACTGATTTTTAACA | | |
| | AAAATCACTCAGATAGAGGAGCTGCCCATTACCTTAATGAGAATTGGTCCTCTTGTGAATCTCCCGCTCCACCTGTAGTCCCCACTTCGGGAGGTGCCACTCAT | | |
| | AGGGACACACGACTAAGCGAGTTAGAGTTTGAGATTAAGCTTCAGAGGCTGACTAATGAGCTTCGGGAACTAAAAAAGATGTCAGAAGCGGAGAAGAGTA | | |
| | ACTCTTCTGTAGTTCACCAGGTGCCGCTAGAAAAGGTTGTGAGTCAGGCTCGTGGGAAAGGACAGAATATGTCTAATACGCTAGCCTTTCCGGTGGTCGAGG | | |
| | TAGTTGATCAACAAGATACTAGGGGCAGACATTACCAGACCTTAGATTTCAAGTTGATAAAAGAGTTAAAGGCGGCTGTTGTGCAATATGGCCCTTCAGCCCC | | |
| | GTTCACTCAAGCATTACTGGACACAGTTGTGGAGTCACACTTAACCCCTTTAGATTGGAAGACTCTTTCTAAGGCTACCCTGTCAGGAGGAGATTTTTTGCTTT | | |
| | GGGATTCTGAATGGCGAGACGCCAGTAAAAAAACTGCTGCTTCTAACGCTCAGGCTGGTAACTCAGACTGGGATAGCAACATGCTTTTAGGAGAGGGCCCTT | | |
| | ATGAGGGACAGACAAATCAGATTGATTTTCCCGTTGCAGTGTACGCGCAAATTGCGACGGCCGCACGCCGTGCTTGGGGAAGGTTGCCAGTCAAAGGAGAG | | |
| | ATTGGTGGAAGTTTAGCTAGCATTCGGCAGAGTTCTGATGAACCATATCAGGATTTTGTGGACAGGCTTTTGATTTCAGCTAGTAGAATTCTTGGAAGTCCGG | | |
| | ACACGGGAAGTCCTTTCGTTATGCAATTGGCTTATGAGAATGCTAATGCAATTTGCCGAGCTGCGATTCAACCGCATAAGGGAACGACAGATTTGGCGGGAT | | |
| | ATGTCCGCCTTTGCGCAGACATCGGGCCTTCCTGCGAGACCTTGCAGGGAACCCACGCGCAGGCAATGTTCTCAAGGAAACGAGGGAAAAATGTATGCTTTA | | |
| | AGTGTGGAGGTTTAGATCATTTTAGAATTGATTGTCCTCAGAACAAGGGTGCCGAGGTTAGACAAACAGGCCGTGGCCCAGGAATATGTCCCCGGTGTGGA | | |
| | AAGGGCCGCCACTGGGCGAAAGATTGTAAGCATAAAACGAGGGTTTTGAGCCGCCCGGTGCCGGGAAACGAGGAAAGGGGTCAGCCCCAGGCCCCGAGTT | | |
| | ACTCAAAGAAGACAGCTTATGGGGCTATAAATCTGCTGCCCAGCCAACAAGATCAGTTCTTGAGCTTGTCAGGTCAAACCCAGGAAATGCAAGACTGGACCT | | |
| | CTGTTCCACTGTCCATGTAGCATTAACCCCAGAAGTGGGAGTCCAAACTCTGCCTACCGGAGTTTTTGGACCACTACCTGTAGGAACCTGTGGTTTTCTCTTAG | | |
| | GACGAAGCAGTTCTATTGTAGAAGGCCTGCAGATTTATCCAGGTGTTATAAGTAATGATTATGAGGGAGAAATTAAAATCATAGCCGCTTGCCCTCGTGGTG | | |
| | CTATAACTATACCCGCTAATCAGAAAATTGCTCAACTTACTTTGATCCCTTTGCGCTGGTCACTATCTAAATTCTTTGAAAATGAAGAAGGACAGAATAACTTTG | | |
| | ACTCCCTTGGCGTAAATTGGGTGAAATCTATCACTAATCAGAGACCTAACCTTAAATTGATTCTTGATGGAAAAAGCTTTGAAGGATTAATAGATACCGGGGC | | |
| | CGATGTAACGATAATTAGAGGGCAGGACTGGCCCTCAAACTGGCCCCTGTCTGTTTCCTTGACTCACCTTCAAGGAATTGGTTATGCCAGTAACCCAAAACGT | | |
| | AGTTCCAAATTGCTAACCTGGAGAGATGAGGATGGAAAATCAGGAAATATTCAGCCGTATGTTATGCCAAATTTGCCTGTAACCCTGTGGGGAAGAGATCTG | | |
| | TTGTCACAGATGGGCGTTATCCTGTGCAGTTCTAAGGAGATGGTGACTGAACAGACGTTCAGGCAGGGACCCCTGCCTGATCGTGGACTAATAAAGAAGGG | | |
| | ACAGAAAATTAAGACCTTTGAGGATCTTAAACCCCACTCTAACGTGAGAGGTTTACAGTATTTTCAGTAGCGGCCACTGTCTTGCCTGCATCCCACGCCGAAA | | |
| | AAATTCAATGGCGTAATGATATTCCGGTATGGGTAGATCAGTGGTCCTTGCCTAAAGAGAAAATAGAGGCCGCTTCTTTGCTAGTGCAGGAGCAGTTAGAAG | | |
| | CAGGACATTTGGTGGAGTCTCACTCTCCCTGGAATACACCCATTTTCATTATCAGGAAGAAATCGGGAAAATGGAGACTATTGCAGGATTTAAGAAAGGTTA | | |
| | ATGAAACCATGGTACTTATGGGAACTTTACAACCGGGGCTTCCCTCCCCAGTAGCCATTCCTAAGGGATATTATAAGATTGTTATAGATTTGAAAGATTGTTTC | | |
| | TTTACCATCCCTTTGCATCCAAAGGATTGTGAGAGATTTGCTTTTAGTGTTCCTTCTGTAAATTTCAAGGAACCCATGAAAAGATATCATTGGACAGTTCTCCCG | | |
| | CAGGGCATGGCTAATAGTCCCACCTTATGTCAAAGGTTTGTGGCAAAGGCAATTCAGCCTGTTAGACAACAATGGCCAAATATTTACATCATCCATTTCACAG | | |
| | ATGATGTCCTGATGGCGGGAAAGGACCCCCAAGATTTGCTTTTGTGTTATGGAGACTTACAAAAGGCCCTGGCTGATAAGGGATTACAAATTGCTTCTGAAA | | |
| | AGATACAAACTCAGGATCCTTATAATTATTTGGGTTTTAGACTCACTGATCAAGCTGTTTTTCCCCAGAAAATTGTTATTCGTAGAGATAACTTAAGGACCTTA | | |
| | AATGATTTTCAAAAATTGTTAGGTGATATAAATTGGCTTCGCCCTTATCTAAAGCTTACTACAGGGGAGTTGAAACCTTTATTTGATATTCTTAAAGGGAGTTC | | |
| | TGATCCCACTTCCCCTAGATCCCTAACCTCAGAAGGGTTGCTGGCCTTACAGCTAGTGGAAAAGGCTATTGAAGAACAGTTTGTCACTTACATAGATTACTCCC | | |
| | TGCCGCTGCACCTGTTAATTTTTAATACGACTCATGTGCCTACGGGATTGCTATGGCAAAAATTTCCTATAATGTGGATACATTCGAGGATTTCTCCCAAACGT | | |
| | AATATCTTGCCATATCACGAAGCAGTGGCTCAGATGATTATCACTGGAAGAAGGCAGGCATTGACTTATTTTGGAAAGGAGCCAGATATCATTGTCCAGCCTT | | |
| | ACAGCGTGAGTCAGGACACTTGGCTGAAACAGCATAGTACAGATTGGTTGCTTGCACAATTAGGGTTTGAAGGAACTCTAGATAGCCACTACCCCCAAGATA | | |
| | GGTTGATAAAATTCTTAAATGTGCATGATATGATATTTCCTAAGATGACTTCCTTACAGCCTTTAAATAATGCTCTGTTGATTTTTACTGATGGCTCCTCTAAAG | | |
| | GGCGAGCTGGATATCTTATTAGTAATCAACAGGTTATCGTAGAGACTCCTGGTCTCTCGGCTCAGCTCGCCGAATTAACAGCAGTACTGAAGGTTTTTCAGTC | | |
| | TGTGCATGAGGCTTTTAATATTTTTACTGACAGTTTATATGTTGCTCAGTCAGTACCCTTACTGGAAACCTGTGGTACGTTTAACTTCAATACGCCGTCAGGATC | | |
| | TTTATTTTCAGAATTACAAAACATCATTCTCGCCCGGAAAAATCCGTTTTATATTGGCCACATACGGTCTCACTCTGGTCTTCCTGGACCTCTGGCAGAGGGTA | | |
| | ATGATCGCATTGACAGAGCTCTAATAGGAGAAGCCTTAGTTTCAGATCGGGTTGCTTTGGCCCAACGTGATCACGAAAGGTTTCATCTTTCTAGCCATACCCT | | |
| | AAGGCTCCGACATAAGATCACAAAGGAGCAAGCGAGAATGATCGTAAAACAATGTCCTAAATGTATTACTTTATCTCCAGTGCCTCATCTAGGAGTTAATCCT | | |
| | AGAGGCCTTATGCCTAATCATATTTGGCAAATGGATATAACCCATTATGCAGAATTTGGAAAACTAAAATATATACATGTTTGCATTGATACTTGTTCAGGATT | | |
| | TCTTTTTGCTTCTCTGCATACAGGAGAAGCTTCAAAAAACGTAATTGATCATTGCCTACAAGCATTTAATGCCATGGGATTGCCTAAACTTATTAAGACAGACA | | |
| | ATGGGCCATCTTATTCCAGTAAAAACTTTATTTCATTCTGTAAAGAATTCGGTATTAATCATAAAACTGGAATTCCTTACAACCCCATGGGACAAGGAATAGTT | | |
| | GAACGTGCTCATCGCACCTTAAAGAATTGGCTTTTTAAGACAAAAGAGGGTCAGCTATATCCCCCAAGGTCACCAAAGGCCCACCTTGCCTTCACTTTATTTGT | | |
| | CCTAAATTTCTTGCACACCGATATCAAGGGCCAGTCTGCAGCGGATCGCCACTGGCATCCAGTTACTTCTAATTCTTATGCATTGGTAAAATGGAAGGACCCCC | | |
| | TGACTAATGAATGGAAGGGTCCAGATCCAGTTCTAATTTGGGGTAGGGGCTCAGTTTGTGTTTTTTCACGAGATGAAGATGGAGCGCGGTGGCTGCCAGAG | | |
| | AGATTAATTCGTCAGATGAACACAGATTCTGACTCTTCTGGTAAGTATCATTCTAAAGACTAAAATTCCTTTTGTGCTTAAAATTCAGCTGAGAGCAACAGCTC | | |
| | TCAAAGCTGTTTGTGTTCTCCAGCTACTCTCTGAACCAGCTCCCGACAGGAGGCCGGAGACTAGCCTCAGCTTTACAATTTGCATTTAAATAAAGTACCTAGAC | | |
| | TTCCCCGAAAGAAGTTCTGCTTTCCTACTTTCTCACTGTCTTTCAAGATTTTGTCTTTCAAGCAGGTAAATCAACATTCCCGAGGCGGACCAGCGGATGTGCATC | | |
| | CCCGCCCCCCTAGAGCACACAGGCGGCAGCTGTTACCCCCAGTCTCAGGACATTTCCAGCATGTGGCTTTCAGTCTGAGTTAAAAATTTAGGTTTACCTAGAG | | |
| | GGCTAGAAGAGTAGATTTTTCTATATCAATAAAGATTGGTTTTTATTTTGGTAGACAGGCTTAGCCCCTTAGCTGACCTCTGGCTTTTCACCCTTGCTGTTACTG | | |
| | CAAGGTGTCCTTAGCTCAATAGGCTGTGGAAAAAACAGGGATGAGGAGGAACGACTTCCAGCTCCTATTTTACCCACAAATCGTGGTGTTATTAACGACATA | | |
| | ATTCTTGCTTAGGCTTTGCTAATTCTGAGGTTGATAATTCTCCTTTAGGAGCTGCACAGCACTCAGAACTGTGCATACTGGTTTGTGATTGTACAAATTCAGTAT | | |
| | GGGCACCGCTTGGTGCAGAGATACTTACTGCAAGGGAAGGTCCGGCTTGACCATTTCTGAGTTTCCTGTGAGATAAACCCGGTTTGAAAGAGGTTGGTACCA | | |
| | AATTTTGGTTAAAAATAAAAAATATTCTCCGGCTCTACCTCGCCTCCCCAAAAGGTACCGAGAGCCACATGTGTGGGTTTTACCCACGGGAGGAATCGGGTCC | | |
| | ATGTCCACCCAAGCCAAGGTTAAAAGCCCACTCATCTACGGATGAGAAAATCATTTGATCACCTCAGTTAAGCGTTGCCTTATTTAACTTAATTAATAGGGGG | | |
| | GAGAGAGATTGGAGACGTACTATTGAAAGGGCAAGCCTTTCACTGCCTCCCACCCAAATAAAAAAGCCAATTGGCCTTGTACTACAAGAGCCGGTCACTCCTT | | |
| | CTCCCTGTTTCCCACCTATCTTCCAAAAATGCGGAGGAATTCAACTTAGTGCTATTTTCACATCGTTCAGTCAAACTTAGCCAGAGTTCCAACGCCCTACTTAAA | | |
| | ATTCAACTAGAAAGTTACCTACCAAGTACTAATTAGCATTATAAAGTCAGAGTCTGCAGCTCCAGGCCTTTCAGTTGTTTACTAGAAAGGACAGTCTTAAGCCA | | |
| | GATACAGTTTACCATAAGAAAGGTTAAAGAATCCCAGTGAAGCAAGTTTTTTCTTTAGCCCTAGATTCCAGGCAGAACTATTGAGCATAGATAATTTTCCCCCC | | |
| | TCAGGCCAGCTTTTTCCTTTTTTTTATTTTGTTAATAATAGGGAGGAGATGTAGTCTCCCCTCCCCCAGCCTGAAACCTGCTTGCTCGGGGTGGAGCTTCCTGCT | | |
| | CATTCGTTCTGCCACGCCCACTGCTGGAACCTGCGGAGCCACACCCGTGCACCTTTCTACTGGACCAGAGATTATTCGGCGGGAATCGGGTCCCCTCCCCCTTC | | |
| | CTTCATAACTGGTGTCGCAACAATAAAATTTGAGCTTTGATCAGTATGAAATTGCCTTAGCTCCGTTTCTTCTTTTGCCCCGTCTAGATTCCTCTCTTACAGCTCG | | |
| | AGCGGCCTTCTCAGTCGAACCGTTCACGTTGCGAGCTGCTGGCGGCCGCAACA | | |
| MusD3 | TGTAGTCTCCCCTCCCCCAGCCTGAAACCTGCTTGCTCAGGGTGGAGCTTCCTGCTCATTCGTTCTGCCACGCCCACTGCTGGAACCTGAGGAGCCACACACGT | 368 | 7486 |
| | GCACCTTTCTACTGGACCCGAGATTATTCGGCGGGAATCGGGTCCCCTCCCCCTTCCTTCATAACTAGTGTCCCAACAATAAAATTTGAGCTTTGATCAGAATG | | |
| | AATTTGTCTTAGCTCCGTTTCTTCTTTCGCCCCGTCTAGATTCCTCTCTTACAGCTCGAGTGGCCTTCTCAGTCGAACCGTTCACGTTGCGAGCTGCTGGCGGCC | | |
| | GCAACATTTTGGCGCCAGAACTGGGACCTGAAGAATGGCAGAGAGATGCTAAGAGGAACGCTGCATTGGAGCTCCACAGGAAAGGATCTTCGTATCGGACA | | |
| | TCGGAGCAACGGACCGTATCAGACATCGGAGCAACGGACAGGTACACATGCTAGCGCTAGCTTAAAATTTCAGTTTTGTAAAGTGTTGCTGAGGATGCGGTA | | |
| | GGATACGAATTAAGCTTGAATCAGTGCTAACCCAACGCTGGTTCTGCTTGGGTCAGCAGCGTGTTAATCGGAACTAGAAACGGAAACAGGCAGGTTAGCCGC | | |
| | AGCTTTTTAGGAAGCTGCTTAGGTGGAAGAAGAAAGGGTTTAAAGTCATGGATCAGGCGGTTGCCCATAGTTTTCAGGAGTTGTTTCAGGCCAGAGGAGTA | | |
| | AGGCTTGAAGTACAATTAGTAAAAAATTTTTTAGGTAAGATAGATAGCTGTTGCCCATGGTTCAAGGAAGAAGAAACACTAGATTGTGGAACCTGGGAGAAA | | |
| | GTTGGTGAGGCCTTAAAAATCACTCAGGCAGATAATTTTACCCTAGGCCTCTGGGCGCTCGTAAATGATGCAATAAAAGATGCCACTTCCCCAGGGCTAAGTT | | |
| | GCCCCCAGGCGGAGCTTGTGGTATCTCAGGAGGAGTGCCTGTCAGAGAGGGCCTCCTCAGAAAAAGATCTTCTTAACTCAAAAACTGATAAATGTGGAAACT | | |
| | CGGATGAAAAACTGATTTTTAACAAAAATCACTCAGATAGAGGAGCTGCCCATTACCTTAATGAGAATTGGTCCTCTTGTGAATCTCCCGCTCCACCTGTAGTC | | |
| | CCCACTTCAGGAGGTGCCACTCATAGGGACACACGACTAAGCGAGTTAGAGTTTGAGATTAAGCTTCAGAGGCTGACTAATGAGCTTCGGGAACTAAAAAA | | |
| | GATGTCAGAAGCGGAGAAGAGTAACTCTTCTGTAGTTCACCAGGTGCCGCTAGAAAAGGTTGTGAGTCAGGCTCGTGGGAAAGGACAGAATATATCTAATA | | |
| | CGCTAGCCTTTCCTGTGGTCGAGGTAATTGATCAGCAAGATACTAGGGGCAGACATTACCAGACCTTAGATTTCAAGTTGATAAAAGAGTTAAAGGCGGCTG | | |
| | TTGTGCAATATGGCCCTTCAGCCCCATTCACTCAAGCATTACTGGACACAGTTGTGGAGTCACACTTAACCCCTTTAGATTGGAAGACTCTTTCTAAGGCTACC | | |
| | CTGTCAGGAGGAGATTTTTTGCTTTGGGATTCTGAATGGCGAGACGCCAGTAAGAAAACTGCTGCTTCTAACGCTCAGGCTGGTAATTCAGACTGGGATAGC | | |
| | AACATGCTTTTAGGAGAGGGCCCTTATGAGGGACAGACAAATCAGATTGATTTTCCCGTTGCAGTGTACGCGCAAATTGCGACGGCCGCACGCCGTGCTTGG | | |
| | GGAAGGTTGCCAGTCAAAGGAGAGATTGGTGGAAGTTTAGCTAGCATTCGGCAGAGTTCTGATGAACCATATCAGGATTTTGTGGACAGGCTATTGATTTCA | | |
| | GCTAGTAGAATCCTTGGGAATCCGGACACGGGAAGTCCTTTCGTTATGCAATTGGCTTATGAGAATGCTAATGCAATTTGCCGAGCTGCGATTCAACCGCATA | | |
| | AGGGAACGACAGATTTGGCGGGATATGTCCGCCTTTGCGCAGACATCGGGCCTTCCTGCGAGACCTTGCAGGGAACCCACGTGCAGGCAATGTTCTCAAGG | | |
| | AAACGAGGGAAAAATGTATGCTTTAAGTGTGGAAGTTTAGATCATTTTAGAATTGATTGTCCTCAGAACAAGGGTGCCGAGGTTAGACAAACAGGCCGTGCC | | |
| | CCAGGAATATGTCCCCGGTGTGGGAAGGGCCGCCACTGGGCAAAAGATTGTAAGCATAAAACGAGGGTTTTGAGCCGCCCGGTGCCGGGAAACGAGGAAA | | |
| | GGGGTCAGCCCCAGGCCCCGAGTTACTCAAAGAAGACAGCTTATGGGGCTATAAATCTGCTGCCCAGCCAACAAGATCAGTTCTTGAGCTTGTCAGGTCAAA | | |
| | CCCAGGAAATGCAAGACTGGACCTCTGTTCCACTGTCCATGCAGCATTAACCCCAGAAGTGGGAGTCCAAACTCTGCCTACCAGAGTCTTTGGACCACTACCT | | |
| | GTAGGAACCTGTGGTTTTCTCTTAGGACGAAGCAGTTCTATTGTAGAAGGCCTGCAGATTTATCCAGGTGTTATAAGTAATGATTATGAGGGAGAAATTAAA | | |
| | ATCATAGCCGCTTGCCCTCGTGGTGCTATAACTATACCCGCTAATCAGAAAATTGCTCAACTTACTTTGATCCCTTTGCGCTGGTCACTATCTAAATTCTTTGAA | | |
| | AATGAAGAAGGACAGAATAACTTTGACTCCTCTGGCGTAAATTGGGTGAAATCTATCACTAATCAGAGACCTAACCTTAAATTGATTCTTGATGGAAAAAGCT | | |
| | TTGAAGGATTAATAGATACCGGGGCCGATGTAACGATTATTAGAGGGCAGGACTGGCCCTCAAACTGGCCCCTGTCTGTTTCCTTGACTCACCTTCAAGGAAT | | |
| | TGGTTATGCCAGTAACCCAAAACGTAGTTCCAAATTGCTAACCTGGAGAGATGAGGATGGAAAATCAGGAAATATTCAGCCGTATGTTATGCCAAATTTGCCT | | |
| | GTGACCCTGTGGGGAAGAGATCTGTTGTCACAGATGGGCGTTATCCTGTGCAGTTCTAAGGAGATGGTGACTGAACAGACATTCAGGCAGGGACTCCTGCCT | | |
| | GATCGTGGACTAATAAAGAAGGGACAGAAAATTAAGACTTTTGAGGATTTTAAACCCCACTCTAACGTGAGAGGTTTAAAGTATTTTCAGTAGCGGCCACTG | | |
| | TCTTGCCTGCATCCCACGCCGAAAAAATTCAATGGCGTAATGATATTCCGGTGTGGGTAGATCAGTGGTCTTTACCTAAAGAGAAAATAGAGGCCGCTTCTTT | | |
| | GCTAGTGCAGGAGCAGTTAGAAGCAGGACATTTGGTGGAGTCTCACTCTCCCTGGAATACACCCGTTTTCATTATCAGGAAGAAATCGGGAAAATGGAGACT | | |
| | GTTGCAAGATTTAAGAAAGGTTAATGAAACCATGGTACTTATGGGAACTTTACAACCGGGGCTCCCCTCCCCAGTAGCCATTCCTAAGGGATATTATAAGATT | | |
| | GTTATAGATTTGAAAGATTGTTTCTTTACCATCCCTTTGCATCCAAAGGATTGTGAGAGATTTGCTTTTAGTGTTCCTTCTGTAAATTTCAAGGAACCCATGAAA | | |
| | AGATATCAATGGACAGTTCTCCCGCAGGGCATGGCTAATAGTCCCACCTTATGTCAAAGGTTTGTGGCAAAGGCAATTCAGCCTGTTAGACAACAATGGCCA | | |
| | AATATTTACATCATTCATTTCACAGATGATGTCTTGATGGTGGGAAAGGACCCCCAAGATTTGCTTTTGTGTTATGGAGACTTACGAAAGGCCCTGGCTGATA | | |
| | AGGGATTACAAATTGCTTCTGAAAAGATACAAACTCAGGATCCTTATAATTATTTGGGTTTTAGACTCACTGATCAAGCTGTTTTTCCCCAGAAAATTGTTATTC | | |
| | GTAGAGATAACTTAAGGACCTTAAATGATTTTCAAAAATTGTTAGGTGACATAAATTGGCTTCGCCCCTATCTAAAGCTTACTACAGGGGAGTTGAAACCTTTA | | |
| | TTTGATATTCTTAAAGGGAGTTCTGATCCCACTTCCCCTAGATCCCTAACCTCAGAAGGATTACTGGCCTTACAGCTAGTGGAAAAGGCTATTGAAGAACAGTT | | |
| | TGTCACTTACATAGATTACTCCCTGCCGCTGCACCTGTTAATTTTTAATACGACTCATGTGCCTACGGGATTGCTATGGCAAAAATTTCCTATAATGTGGATACA | | |
| | TTCGAGGATTTCTCCCAAACGTAATATCTTGCCATATCACGAAGCAGTGGCTCAGATGATTATCACTGGAAGAAAGCAGGCATTGACTTATTTTGGAAAGGAG | | |
| | CCAGATATCATTGTCCAGCCTTACAGCGTGAGTCAGGACACTTGGCTGAAACAGCATAGTACAGATTGGTTGCTTGCACAATTAGGGTTTGAAGGAACTATA | | |
| | GATAGCCACTACCCCCAAGATAGGTTGATAAAATTCTTAAATGTGCATGATATGATATTTCCTAAGATGACTTCCTTACAGCCTTTAAATAATGCTCTATTGATT | | |
| | TTTACTGATGGCTCCTCTAAAGGGCGAGCTGGATATCTTATTAGTAATCAACAGGTTATCGTAGAGACTCCTGGTCTCTCGGCTCAGCTCGCCGAATTAACAG | | |
| | CAGTACTGAAGGTTTTTCAGTCTGTACATGAGGCTTTTAATATTTTTACTGACAGTTTATATGTTGCTCAGTCAGTACCCTTATTGGAAACCTGTGGTACGTTTA | | |
| | ACTTCAATACGCCGTCAGGATCTTTATTTTCAGAATTACAAAACATCATTCTCGCCCGGAAAAATCCGTTTTATATTGGCCACATACGGTCTCACTCTGGTCTTC | | |
| | CTGGACCTCTGGCAGAGGGTAATGATCGCATTGACAGAGCTCTAATAGGAGAAGCCTTAGTTTCAGATCGGGTTGCTTTGGCCCAACGTGATCTTGAAAGGT | | |
| | TTCATCTTTCTAGCCATACCCTAAGGCTCCGGCATAAGATCACAAAGGAGCAAGCGAGAATGATCCTAAAACAATGTCCTAAATGTATTACTTTATCTCCAGTG | | |
| | CCGCATCTAGGAGTTAATCCTAGAGGCCTTATGCCTAATCATATTTGGCAAATGGATATAACCCATTATGCAGAATTTGGAAAACTAAAATATATACATGTTTG | | |
| | CATTGATACTTGTTCAGGATTTCTTTTTGCTTCTCTGCATACAGGAGAAGCTTCAAAAAACGTAATTGATCATTGCCTACAAGCATTTAATGCCATGGGATTGCC | | |
| | TAAACTTATTAAGACAGACAATGGGCCATCTTATTCCAGTAAAAACTTTATTTCATTCTGTAAAGAATTCGGTATTAAACATAAAACTGGAATTCCTTACAACCC | | |
| | CATGGGACAGGGAATAGTTGAACGTGCTCATCGCACCTTAAAGAATTGGCTCTTTAAGACAAAAGAGGGGCAGCTATATCCCCCAAGGTCACCAAAGGCCCA | | |
| | CCTTGCCTTCACCTTATTTGTCCTAAATTTCTTGCACACCGATATCAAGGGCCAGTCTGCAGCGGATCGCCACTGGCATCCAGTTACTTCTAATTCTTATGCATT | | |
| | GGTAAAATGGAAGGACCCCCTGACTAATGAATGGAAGGGTCCAGATCCAGTTCTAATTTGGGGTAGGGGCTCAGTTTGTGTTTTTTCACGAGATGAAGATAG | | |
| | AGCGCGGTGGCTGCCAGAGAGATTAATTCGTCAGATGAACACAGATTCTGACTCTTCTGGTAAGTATCATTCTAAAGACTAAAATTCCTTTTGTGCTTAAAATT | | |
| | CAGCTGAGAGCAACAGCTCTCAAAGCTGTTCTCCAGCTACTCTCTGAGCCAGCTCCCGACAGGAGGCCGGAGACTAGCCTCAGCTTTACAATTTGCATTTGAA | | |
| | TAAAGTACCTAGACTTCCCCTAAAGAAGTTCTGTTTTCCTACTTTCTCACTGTCTTTCAAGATTTTGTCTTTCAAGCAGGTAAATCAACATTCTCGAAGCGGACC | | |
| | AGCGGATGTGCATCCCCGCCCCCCTAGAGCATGCAGGTGGCAGCTGTTATCCCCAGTCTCAGGACATTTCCAGCACATGGTTTTCAGTCTGAGTTAAAAATTT | | |
| | AGGTTTACCTAGAGGGCTAGAAGAGTAGATATTTCTATATTAATAAAGATTGGTTTTTATTTTGATAGACAGGCTTAGCCCCTTAGCTGACCTCTGGCTTTTCA | | |
| | CCCTTGCTGTTACTGCAAGGTGTCCTTAGCTCAATAGGCTGTGGAAAAAACAGGGATGAGGAGGAACGACTTCCAGCTCCTATTTTAGCCACAAATCGTGGT | | |
| | GTTACTAATGACATAATTCTTGCTTAGGCTTTGCTAATTCTGAGGTTGATAATTCTCCTTTAGGAGCTGCACAGCACTCAGAACTGTGCATACTGGTTTGTGATT | | |
| | GTACAAATTCAGTATGGGCATCGCTTGGTGCAGAGGTACTGCAAGGGAAGGTCCGGCTTGACCATTTCTGAGTTTCCTGTGAGATAAACCCGGTTTAAAAGA | | |
| | GGTTGGTATCATATTTTGGTTAAAAATAAAAAATATTTTCCGGCTCTACCTTGCCTCCCCAAAAGATACCCAGAGCCACATGTGTGGGTTTTACCAGTACCCAC | | |
| | GGGAGGAATCGGGTCCATGTCCACCCAAGCCAAGGTTAAAAGCCCACTCATCTACGGATGAGAAAATCATTTGATCACCTCAGTTAAGCGTTGCCTTATTTAA | | |
| | CTTAATTAATAGGGGGGAGAGAGATTGGAGACGTACTATTAAAAGGGCAAGCCCTTCACTGCCTCCCACCCAAATAAAAGAGCCGGTCGAACGCCTTCTCCC | | |
| | TGTTTCCCACCTATCATCCAAAAATGCGGAGGAATATCAACTTAGTGTTATTTTCCCATTTGTTCAGTCAAACTTAGCCAGAGTTCCAACGCCCTACTTAAAATT | | |
| | CAACTAGAAAGTTACCTACCAAGTACTAATTAGCATTATAAAGTCAGAGTCTGCAGCTCCAGGCCTTTCAGTTAGTTGTTTACTAGAAAGGACAGTCTTAAGCC | | |
| | AGATACAGTTTACCATAAGAAAAGTTAAAGAATCCCAGTGAAGCAAGTTTTTTCTTTAGCCCTAGATTCTAGGCAGAACTATTGAGCATAGATAATTTTTCCCC | | |
| | CCTCAGGCCAGCTTTTTCTTTTTTTTTAAATTTTGTTAATAAAAGGGAGGAGATGTAGTCTCCCCCTCCCCCAGCCTGAAACCTGCTTGCTCAGGGTGGAGCTTC | | |
| | CTGCTCATTCATTCTGCCACGCCCACTGCTGGAACCTGAGGAGCCACACACGTGCACCTTTCTACTGGACCCGAGATTATTCGGCGGGAATCGGGTCCCCTCC | | |
| | CCCTTCCTTCATAACTAGTGTCCCAACAATAAAATTTGAGCTTTGATCAGAATGAATTTGTCTTAGCTCCGTTTCTTCTTTCGCCCCGTCTAGATTCCTCTCTTAC | | |
| | AGCTCGAGTGGCCTTCTCAGTCGAACCGTTCACGTTGCGAGCTGCTGGCGGCCGCAACA | | |
| MusD4 | TGTAGTCTCCCCTCCCCTAGCCTGAAACCTGCTTGCTCGGGGTGGAGCTTCCTGCTCATTCGTTCTGCCATGCCCACTGCTGGAACCTGAGGAGCCACACACGT | 369 | 7454 |
| | GCACCTTTCTACTGAACCAGAGATTATTCGGCGGGAATCGGGTCCCCTCCCCCTTCCTTCATAACTAATGTCGCAACAATAAAATTTGAGCTTTGATCAGAATG | | |
| | AAATTGTCTTAGCTCCGTTTTTTCTTCCGCCCCGTCTAGATTCCTCTCTTACAGCTCGAGCGGCCTTCTCAGTCGAACCGTTCACGTTGCGAGCTGCTGGCGGCC | | |
| | GCAACATTTTGGCGCCCGAACAGGGACCTGAAGAATGGCAGAGAGATGCTAAGAGGAACGCTGCATTGGAGCTCCACAGGAAAGGATCTTCGTATCGGACA | | |
| | TCGGAGCAACGGACAGGTACACATGCTAGCGCTAGCTTAAAATTTCAGTTTTGTAAAGTGTTGCTGAGGATGCGGTAGGATACGAATTAAGCTTGAATCAGT | | |
| | GCTAACCCAACGCTGGTTCTGCTTGGGTCAGCAGCGTGTTAATCGGAACTAGAAACGGAAACAGGCAGGTTAGCCGCAGCTTTTTAGAAAGCTGCTTAGGTG | | |
| | GAAGAAGAAAGGGTTTAAAGTCATGGATCAGGCGGTTGCCCATAGTTTTCAGGAGTTGTTTCAGGCCAGAGGAGTAAGGCTTGAAGTACAATTAGTAAAAA | | |
| | ATTTTTTAGGTAAGATAGATAGCTGTTGCCCATGGTTCAAGGAAGAAGAAACACTAGATTGTGGAACCTGGGAGAAAGTTGGTGAGGCCTTAAAAATCACTC | | |
| | AGGCAGATAATTTTACCCTAGGCCTCTGGGCGCTCGTAAATGATGCAATAAAAGATGCCACTTCCCCAGGGCTAAGTTGCCCCCAGGCGGAGCTTGTGGTAT | | |
| | CTCAGGAGGAGTGCCTGTCAGAGAGGGCCTCCTCAGAAAAAGATCTTCTTAACTCAAAAATTGATAAATGTGGAAACTCGGATGAAAAACTGATTTTTAACA | | |
| | AAAATCACTCAGATAGAGGAGCTGCCCATTACCTTAATGAGAATTGGTCCTCTTGTGAATCTCCCGCTCCACCTATAGTCCCCACTTCGGGAGGTGCCACTCAT | | |
| | AGGGACACACGACTAAGCGAGTTAGAGTTTGAGATTAAGCTTCAGAGGCTGACTAATGAGCTTCGGGAACTAAAAAAGATGTCAGAAGCGGAGAAGAGTA | | |
| | ACTCTTCTGTAGTTCACCAGGTGCCGCTAGAAAAGGTTGTGAGTCAGGCTCGTGGGAAAGGACAGAATATGTCTAATACGCTAGCCTTTCCGGTGGTCGAGG | | |
| | TAGTTGATCAGCAAGATACTAGGGGCAGACATTACCAGACCTTAGATTTCAAGTTGATAAAAGAGTTAAAGGCGGCTGTTGTGCAATATGGCCCTTCAGCCC | | |
| | CATTCACTCAAGCATTACTGGACACAGTTGTGGAGTCACACTTAACCCCTTTAGATTGGAAGACTCTTTCTAAGGCTACCCTGTCAGAAGGAGATTTTTTGCTT | | |
| | TGGGATTCTGAATGGCGAGACGCCAGTAAGAAAACTGCTGCTTCTAACGCTCAGGCTGGTAATTCAGATTGGGATAGCAACATGCTTTTAGGAGAGGGCCCT | | |
| | TATGAGGGACAGACAAATCAGATTGATTTTCCCGTTGCAGTGTACGCGCAAATTGCGACGGCCGCACGCCGTGCTTGGGGAAGGTTGCCAGTCAAAGGAGA | | |
| | GATTGGTGGAAGTTTAGCTAGCATTCGGCAGAGTTCTGATGAACCATATCAGGATTTTGTGGACAGGCTATTGATTTCAGCTAGTAGAATCCTTGGGAATCCG | | |
| | GACACGGGAAGTCCTTTCGTTATGCAATTGGCTTATGAGAATGCTAATGCAATTTGCCGAGCTGCGATTCAACCGCATAAGGGAACGACAGATTTGGCAGGA | | |
| | TATGTCCGCCTTTGTGCAGACATCGGGCCTTCCTGCGAGACCTTGCAGGGAACCCACGCGCAGGCAATGTTCTCAAGGAAACGAGGGAAAAATGTATGCTTT | | |
| | AAGTGTGGAAGTTTAGATCATTTTAGAATTGATTGTCCTCAGAACAAGGGTGCCGAGGTTAGACAAACAGGCCGTGGCCCAGGAATATGTCCCCGGTGTGG | | |
| | GAAGGGCCGCCACTGGGCAAAAGATTGTAAGCATAAAACGAGGGTTTTGAGCCGCCCGGTGCCGGGAAACGAGGAAAGGGGTCAGCCCCAGGCCCCGAGT | | |
| | TACTCAAAGAAGACAGCTTATGGGGCTATAAATCTGCTGCCCAGCCAACAAGATCAGTTCTTGAGCTTGTCAGGTCAAACCCAGGAAATGCAAGACTGGACC | | |
| | TCTGTTCCACTGTCCATGCAGCATTAACCCCAGAAGTGGGAGTCCAAACTCTGCCTACCGGAGTTTTTGGACCACTACCTGTAGGAACCTGTGGTTTTCTCTTA | | |
| | GGACGAAGCAGTTCTATTGTAGAAGGCCTGCAGATTTATCCAGGTGTTATAAGTAATGATTATGAGGGAGAAATTAAAATCATAGCCGCTTGCCCTCGTGGT | | |
| | GCTATAACTATACCCGCTAATCAGAAAATTGCTCAACTTACTTTGATCCCTTTGCGCTGGTCACTATCTAAATTCCTTGAAAATGAAGAAGGACAGAATAACTT | | |
| | TGACTCCTCTGGTGTAAATTGGGTGAAATCTATCACCAATCAGAGACCTAACCTTAAATTGATTCTTGATGGAAAAAGCTTTGAAGGATTAATAGATACCGGG | | |
| | GCCGATGTAATGATCATCAGAGGGCAGGACTGGCCCTCAAACTGGCCCCTGTCTGTTTCCTTGACTCACCTTCAAGGAATTGGTTATGCCAGTAACCCAAAAC | | |
| | GTAGTTCCAAATTGCTAACCTGGAGAGATGAGGATGGAAAATCAGGAAATATTCAGCCGTATGTTATGCCAAATTTGCCTGTAACCCTGTGGGGAAGAGATC | | |
| | TGTTGTCACAGATGGGCGTTATCCTGTGCAGTTCTAAGGAGATGGTGACTGAACAGACGTTCAGGCAGGGACCCCTGCCTGATCGTGGACTAATAAAGAAG | | |
| | GGACAGAAAATTAAGACTTTTGAGGATCTTAAACCCCACTCTAACGTGAGAGGTTTAAAGTATTTTCAGTAGCGGCCGCTGTCTTGCCTGCATCCCACGCCGA | | |
| | AAAAATTCAATGGCGTAATGATATTCCGGTGTGGGTAGATCAGTGGTCTTTACCTAAAGAGAAAATAGAGGCCGCTTCTTTGCTAGTGCAGGAGCAGTTAGA | | |
| | AGCAGGACATTTGGTGGAGTCTCACTCTCCCTGGAATACACCCATTTTCATTATCAGGAAGAAATCGGGAAAATGGAGACTGTTGCAAGATTTAAGAAAGGT | | |
| | TAATGAAACCATGGTACTTATGGGAACTTTACAACCGGGGCTCCCCTCCCCAGTAGCCATTCCTAAGGGATATTATAAGATTGTTATAGATTTGAAAGATTGTT | | |
| | TCTTTACCATCCCTTTGCATCCAAAGGATTGTGAGAGATTTGCTTTTAGTGTTCCTTCTGTAAATTTCAAGGAACCCATGAAAAGATATCATTGGACAGTTCTCC | | |
| | CGCAGGGCATGGCTAATAGTCCCACCTTATGTCAAAGGTTTGTGGCAAAGGCAATTCAGCCTGTTAGACAACAATGGCCAAATATTTACATCATCCATTTCAC | | |
| | AGATGATGTCTTGATGGGGGAAAGGACCCCCAAGATTTGCTTTTGTGTTATGGAGACTTACGAAAGGCCCTGGCTGATAAGGGATTACAAATTGCTTCTGA | | |
| | AAAGATACAAACTCAGGATCCTTATAATTATTTGGGTTTTAGACTCACTGATCAAGATGTTTTTCCCCAGAAAATTGTTATTCGTAGAGATAACTTAAGGACCT | | |
| | TAAATGATTTTCAAAAATTGTTAGGTGATATAAATTGGCTTCGCCCCTATCTAAAGCTTACTACAGGGGAGTTGAAACCTTTATTTGATATTCTTAAAGGGAGT | | |
| | TCTGATCCCACTTCCCCTAGATCCCTAACCTCAGAAGGATTACTGGCCTTACAGCTAGTGGAAAAGGCTATTGAAGAACAGTTTGTCACTTACATAGATTACTC | | |
| | CCTGCCGCTGCACCTGTTAATTTTTAATACGACTCATGTGCCTACGGGATTGCTATGGCAAAAATTTCCTATAATGTGGATACATTCGAGGATTTCTCCCAAAC | | |
| | GTAATATCTTGCCATATCACGAAGCAGTGGCTCAGATGATTATCACTGGAAGAAGGCAGGCATTGACTTATTTTGGAAAGGAGCCAGATATCATTGTCCAGCC | | |
| | TTACAACGTGAGTCAGGACACTTGGCTGAAACAGCATAGTACAGATTGGTTGCTTGCGCAATTAGGGTTTGAAGGAACTCTAGATAGCCACTACCCCCAAGA | | |
| | TAGGTTGATAAAATTCTTAAATGTGCATGATATGATATTTCCTAAGATGACTTCCTTACAGCCTTTAAATAATGCTCTGTTGATTTTTACTGATGGCTCCTCTAA | | |
| | AGGGCGAGCTGGATATCTTATTAGTAATCAACAGGTTATCGTAGAGACTCCTGGTCTCTCGGCTCAGCTCGCCGAATTAACAGCAGTACTGAAGGTTTTTCAG | | |
| | TCTGTGCATGAGGCTTTTAATATTTTTACTGACAGTTTATATGTTGCTCAGTCAGTACCCTTATTGGAAACCTGTGGTACGTTTAACTTCAATACGCCGTCAGGA | | |
| | TCTTTATTTTCAGAATTACAAAACATCATTCTCGCCCGGAAAAATCCGTTTTATATTGGCCACATACGGTCTCACTCTGGTCTTCCTGGACCTCTGGCAGAGGGT | | |
| | AATGATCGCATTGACAGAGCTCTAATAGGAGAAGCCTTAGTTTCAGATCGGGTTGCTTTGGCCCAACGTGATCACGAAAGGTTTCATCTTTCTAGCCATACCC | | |
| | TAAGACTCCGACATAAGATCACAAAGGAGCAAGCGAGAATGATCGTAAAACAATGTCCTAAATGTATTACTTTATCTCCAGTGCCGCATCTAGGAGTTAATCC | | |
| | TAGACGCCTTATGCCTAATCATATTTGGCAAATGGATATAACCCATTATGCAGAATTTGGAAAACTAAAATATATACATGTTTGCATTGATACTTGTTCAGGAT | | |
| | TTCTTTTTGCTTCTCTGCATACAGGAGAAGCTTCAAAAAACGTAATTGATCATTGCCTACAAGCATTTAATGCCATGGGATTGCCTAAACGTATTAAGACAGAC | | |
| | AATGGGCCATCTTATTCCAGTAAAAACTTTATTTCATTCTGTAAAGAATTCGGTATTAAACATAAAACTGGAATTCCTTACAACCCCATGGGACAAGGAATAGT | | |
| | TGAACGTGCTCATCGCACCTTAAAGAATTGGCTTTTTAAGACAAAAGAGGGTCAGCTATATCCCCCAAGGTCACCAAAGGCCCACCTTGCCTTCACTTTATTTG | | |
| | TCCTAAATTTCTTGCACACTGATATCAAGGGCCAGTCTGCAGCGGATCGCCACTGGCATCCAGTTACTTCTAATTCTTATGCATTGGTAAAATGGAAGGACCCC | | |
| | CTGACTAATGAATGGAAGGGTCCAGATCCAGTTATAATTTGGGGTAGGGGCTCAGTTTGTGTTTTTTCACGAGATGAAGATGGAGCGTGGTGGCTGCCAGA | | |
| | GAGATTAATTCGTCAGATGAACACAGATTCTGACTCTTCTGGTAAGTATCATTCTAAAGACTAAAATTCCTTTTGTGCTTAAAATTCAGCTGAGAGCAACAGCT | | |
| | CTCAAAGCTGTTCTCCAGCTACTCTCTGAGCCAGCTTCCCGGCAGGAGGCCGGAGACTAGCCTCAGTTTTACAATTTGCATTTGAATAAAGTACCTAGACTTCC | | |
| | CTGAAAGAAGTTCTGCTTTCCTACTTTCTCACTGTCTTTCAAGATTTTGTCTTTGAAGCAGGTAAATCAACATTCCCGAGGCGGACCAGTGGATGTGCATCCCC | | |
| | GCCCCCCTAGAGCACACAGGTGGCAGCTGTTACCCCCAGTCTCAGGACATTTCCAGCACGTGGTTTTCAGTCTGAGTTAAAAATTTAGGTTTACCTAGAGGGC | | |
| | TAGAAGAGCAGATATTTCCATATTAATAAAGATTGGTTTTTATTTTGATAGACAGGCTTAGCCCCTTAGCTGACCTCTGGCTTTTCACCCTTGCTGTTACTGCAA | | |
| | GGTGTCCTTAGCTCAATAGGCTGTGGAAAAAACAGGGATGAGGAGGAACGACTTCCAGCTCCTATTTTAGCCACAAATCGTGGTGTTACTAACGACATAATT | | |
| | CTTGCTTAGGCTTTGCTAATTCTGAGGTTGATAATTCTCCTTTAGGAGCTGCACAGCACTCAGAACTGTGCATACTGGTTTGTGATTGTACAAATTCAGTATGG | | |
| | GCACCGCTTGGTGCAGAGATACTTACTGCAAGGGAAGGTCCGGCTTGACCATTTCTGAGTTTCCTGTGAGATAAACCCGGTTTGAAAGAGGTTGGTACCAAA | | |
| | TTTTGGTTAAAAATAAAAAATATTCTCCGGCTCTACCTCGCCTCCCCAAAAGGTACCGAGAGCCACATGTGTGGGTTTTACCCACGGGAGGAATCGGGTCCAT | | |
| | GTCCACCCAAGCCAAGGTTAAAAGCCCACTCATCTACGGATGAGAAAATCATTTGATCACCTCAGTTAAGCGTTGCCTTATTTAACTTAATTAATAGGGGGGA | | |
| | GAGAGATTGGAGACGTACTATTGAAAGGGCAAGCCCTTCACTGCCTCCCACCCAAATAAAAGAGCCGGTCGAACGCCTTCTCCCTGTTTCCCACCTATCTTCC | | |
| | AAAAATGCGGAGGAATTCAACTTAGTGTTATTTTCACATCGTTCAGTCAAACTTAGCCAGAGTTCCAACGCCCTACTTAAAATTCAACTAGAAAGTTACCTACC | | |
| | AAGTACTAATTAGCATTATAAAGTCAGAGTCTGCAGCTCCAGGCCTTTCAGTTAGTTGTTTACTAGAAAGGACAGTCTTAAGCCAGATACAGTTTACCATAAG | | |
| | AAAAGTTAAAGAATCCCAGTGAAGCAAGTTTTTTCTTTAGCCCTAGATTCCAGGCAGAACTATTGAGCATAGATAATTTTCCCCCCTCAGGCCAGCTTTTTCTTT | | |
| | TTTTTAATTTTGTTAATAAAAGGGAGGAGATGTAGTCTCCCCTCCCCTAGCCTGAAACCTGCTTGCTCGGGGTGGAGCTTCCTGCTCATTCGTTCTGCCACACC | | |
| | CACTGCTGGAACCTGAGGAGCCACACACGTGCACCTTTCTACTGGACCAGAGATTATTTGGCGGGAATCGGGTCCCCTCCCCCTTCCTTCATAACTAATGTCG | | |
| | CAACAATAAAATTTGGGCTTTGATCAGAATGAAATTGTCTTAGCTCCGTTTTTTCTTCCGCCCCGTCTAGATTCCTCTCTTACAGCTCGAGCGGCCTTCTCAGTC | | |
| | GAACCGTTCACGTTGCGAGCTGCTGGCGGCCGCAACA | | |
| MusD5 | TGTAGTCTCCCCTCCCCCAGCCTGAAACCTGCTTGCTCGGGGTGGAGCTTCCTGCTCATTCGTTCTGCCACGCCCACTGCTGGAACCTGAGGAGCCACACACGT | 370 | 7472 |
| | GCACCTTTCTACTGGACCCGAGATTATTCGGGGGGAATCGGGTCCCCTCCCCCTTCCTTCATAACTAGTGTCCCAACAATAAAATTTGAGCTTTGATCATAATG | | |
| | AATTTGTCTTAGCTCTGTTTCTTCTTTCGCCCCGTCTAGATTCCTCTCTTACAGCTCGAGTAGCCTTCTCAGTCGAACCGTTCATGTTGCGAGCTGCTGGCGGGT | | |
| | GCAACATTTTGGCGCCAGAACTGGGACCTGAAGAATGGCAGAGAGATGCTAAGAGGAACGCTGTGGTGGAGCTCCACAGGAAAGGATCTTCATATCGGAC | | |
| | ATCGGAGCAACGGACAGGTACACATGCTAGCGCTAGCTTAAAATTTCAGTTTTGTAAAGTGTTGCTGAGGATGCGGTAGGATACGAATTAAGCTTGAATCAG | | |
| | TGCTAACCCAACGCTGGTTCTGCTTGGGTCAGCAGCGTGTTAATCGGAACTAGAAACGGAAACAGGCAGGTTAGCCGCAGCTTTTTAGGAAGCTGCTTAGGT | | |
| | GGAAGAAGAAAGGGTTTAAAGTCATGGATCAGGCGGTTGCCCATAGTTTTCAGGAGTTGTTTCAGGCCAGAGGAGTAAGGCTTGAAGTACAATTAGTAAAA | | |
| | AAATTTTTAGGTAAGATAGATAGCTGTTGCCCATGGTTCAAGGAAGAAGAAACACTAAATTGTGGAACCTGGGAGAAAGTTGGTGAGGCCTTAAAAATCACT | | |
| | CAGGCAGATAATTTTACCCTAGGCCTCTGGGCGCTCGTAAATGATGCAATAAAAGATGCCACTTCCCCAGGGCTAAGTTGCCCCCAGGCGGAGCTTGTGGTA | | |
| | TCTCAGGAGGAGTGCCTGTCAGAGAGGGCCTCCTCAGAAAAAGATCTTCTTAACTCAAAAGTTGATAAATGTGGAAACTCAGATGAAAAACTGATTTTTAAC | | |
| | AAAAATCACTCAGATAGAGGAGCTGCCCATTACCTTAGTGAGAATTGGTCCTCTTGTGAATCTCCCGCTCCACCTGTAGTCCCCACTTCGGGAGGTGCCACTC | | |
| | ATAGGGACACACGACTAAGCGAGTTAGAGTTTGAGATTAAGCTTCAGAGGCTGACTAATGAGCTTCGGGAACTAAAAAAGATGTCAGAAGCGGAGAAGAG | | |
| | TAACTCTTCTGTAGTTCACCAGGTGCCGCTAGAAAAGGTTGTGAGTCAGGCTCGTGGGAAAGGACAGAATATGTCTAATACGCTAGCCTTTCCTGTGGTCGA | | |
| | GGTAGTTGATCAGCAAGATACTAGGGGCAGACATTGCCAGACCTTAGATTTCAAGTTGATAAAAGAGTTAAAGGCGGCTGTTGTGCAATATGGCCCTTCAGC | | |
| | CCCATTCACTCAAGCATTACTGGACACAGTTGTGGAGTCACACTTAACCCCTTTAGATTGGAAGACTCTTTCTAAGGCTACCCTGTCAGGAGGAGATTTTTTGC | | |
| | TTTGGGATTCTGAATGGCGAGACGCCAGTAAGAAAACTGCTGCTTCTAACGCTCAGGCTGGTAATTCAGGCTGGGATAGCAACATGCTATTAGGGGAGGGT | | |
| | CCATATGAAGGACAAACAAATCAGATTGATTTTCCTGTTGCAGTGTACGCACAAATTGCGACGGCCGCGCGCCGAGCTTGGGGAAGGTTGCCAGTCAAAGG | | |
| | AGAGATTGGTGGAAGTTTAGCTAGCATTCGGCAGAGTTCTGATGAACCATATCAGGATTTTGTGGACAGGCTATTGATTTCAGCTAGTAGAATCCTTGGGAA | | |
| | TCCGGACACGGGAAGTCCTTTCGTTATGCAATTGGCTTATGAGAATGCTAATGCAATTTGCCGAGCTGCGATTCAACCGCATAAGGGAACGACAGATTTGGC | | |
| | GGGATATGTCCGCCTTTGCGCAGACATCGGGCCTTCCTGCGAGATCTTGCAGGGAACCCACGTGCAAGCAATGTTCTCAAGGAAACGAGGGAAAAATGTAT | | |
| | GCTTTAAGTGTGGAAGTTTAGATCATTTTAGAATTGATTGTCCTCAGAACAAGGGTGCCGAGGTTAGACAAACAGGCCGTGCCCCAGGAATATGTCCCCGGT | | |
| | GTGGGAAGGACCGCCACTGGGCAAAAGATTGTAAGCATAAAACAAGGGTTTTGAGCCGCCCGGTGCCGGGAAATGAGGAAAGGGGTCAGACCCAGGCCCC | | |
| | GAGTTACTCAAAGAAGACAGCTTATGGGGCTATAAATCTGCTGCCCAGACAACAAGATCAGTTCTTGAGCTTGTCAGGTCAAACCCAGGAAATGCAAGACTG | | |
| | GACCTCTGTTCCACTGTCCATGCAGCATTAACCCCAGAAGTGGGAGTCCAAACTCTGCCTACCGGAGTCTTTGGACCACTACCTGTAGGAACCTGTGGTTTTCT | | |
| | CTTAGGACGAAGCAGTTCTATTGTAGAAGGCCTGCAGATTTATCCAGGTGTTATAAGTAATGATTATGAGGGAGAAATTAAAATCATAGCCGCTTGCCCTCGT | | |
| | GGTGCTCTAACTATACCCGCTAATCAGAAAATTGCTCAACTTACTTTGATCCCTTTGCGCTGGTCACTATCTAAATTCTTTGAAAATGAAGAAGGACAGAATAA | | |
| | CTTTGACTCCTCTGGCGTAAATTGGGTGAAATCTATCACCAATCAGAGACCTAACCTTAAATTGATTCTTGATGGAAAAAGCTTTGAAGGATTAATAGATACCG | | |
| | GGGCCGATGTAACGATTATTAGAGGGCAGGACTGGCCCTCAAACTGGCCCCTGTCTGTTTCCTTGACTCACCTTCAAGGAATTGGTTATGCCAGTAACCCAAA | | |
| | ACGTAGTTCCAAATTGCTAACCTGGAGAGATGAGGATGGAAAATCAGAAAATATTCAACCGTATGTTATGCCAAATTTGCCTGTAACCCTGTGGGGAAGAGA | | |
| | TCTGTTGTCACAGATGGGCGTTATCCTGTGCAGTTCTAAGGAGATGGTGACTGAACAGACGTTCAGGCAGGGACCCCTGCCTGATCGTGGACTAATAAAGAA | | |
| | GGGACAGAAAATTAAGACTTTTGAGGATCTTAAACCCCACTCTAACGTGAGAGGTTTAAAGTATTTTCAGTAGCGGCCACTGTCTTGCCTGCATCCCACGCCG | | |
| | AAAAAATTCAATGGCGTAATGATATTCCGGTGTGGGTAGATCAGTGGTCTTTACCTAAAGAGAAAATAGAGGCTGCTTCTTTGCTAGTGCAGGAGCAGTTAG | | |
| | AAGCAGGACATTTGGTGGAGTCTCACTCTCCCTGGAATACACCCATTTTCATTATCAGGAAGAAATCGGGAAAATGGAGACTGTTGCAAGATTTAAGAAAGG | | |
| | TTAATGAAACCATGGTACTTATGGGAACTTTACAACCGGGGCTCCCCTCCCCAGTAGCCATTCCTAAGGGATATTATAAGATTGTTATAGATTTGAAAGATTGT | | |
| | TTCTTTACCATCCCTTTGCATCCAAAGGATTGTGAGAGATTTGCTTTTAGTGTTCCTTCTGTAAATTTCAAGGAACCCATGAAAAGATATCAATGGACAGTTCTC | | |
| | CCGCAGGGCATGGCTAATAGTCCCACCTTATGTCAAAGGTTTGTGGCAAAGGCAATTCAGCCTGTTAGACAACAATGGCCAAATATTTACATCATTCATTTCAC | | |
| | AGATGATGTCTTGATGGCGGGAAAGGACCCCCAAGATTTGCTTTTGTGTTATGGAGACTTACGAAAGGCCCTGGCTGATAAGGGATTACAAATTGCTTCTGA | | |
| | AAAGATACAAACTCAGGATCCTTATAATTATTTGGGTTTTAGACTCACTGATCAAGCTGTTTTTCCCCAGAAAATTGTTATTCGTAGAGATAACTTAAGGACCT | | |
| | TAAATGATTTTCAAAAATTGTTAGGTGATATAAATTGGCTTCGCCCCTATCTAAAGCTTACTACAGGGGAGTTGAAACCTTTATTTGATATTCTTAAAGGGAGT | | |
| | TCTGATCCCACTTCCCCTAGATCCCTAACCTCAGAAGGACTACTGGCCTTACAGCTAGTGGAAAAGGCTATTGAAGAACAGTTCGTCACTTACATAGATTACTC | | |
| | CCTGCTGCTGCACCTGTTAATTTTTAATACGACTCATGTGCCTACAGGATTGCTATGGCAAAAATTTCCTATAATGTGGATACATTCGAGGATTTCTCCCAAAC | | |
| | GTAATATCTTGCCATATCACGAAGCAGTGGCTCAGATGATTATCACTGGAAGAAGGCAGGCATTGACTTATTTTGGAAAGGAGCCAGATATCATTGTCCAGCC | | |
| | TTACAGCGTGAGTCAGGACACTTGGCTGAAACAGCATAGTACAGATTGGTTGCTTGCACAATTAGGGTTTGAAGGAACTATAGATAGCCACTACCCCCAAGA | | |
| | TAGGTTGATAAAATTCTTAAATGTACATGATATGATATTTCCTAAGATGACTTTCTTACAGCCTTTAAATAATGCTCTATTGATTTTTACTGATGGCTCCTCTAAA | | |
| | GGGCGAGCTGGATATCTTATTAGTAATCAACAGGTTATTGTAGAGACTCCTGGTCTCTCGGCTCAGCTCGCCGAATTAACAGCAGTACTGAAGGTTTTTCAGT | | |
| | CTGTACATGAGGCTTTTAATATTTTTACTGACAGTTTATATGTTGCTCAGTCAGTACCCTTATTGGAAACCTGTGGTATGTTTAACTTCAATACGCTGTCAGGAT | | |
| | CTTTATTTTCAGAATTACAAAACATCATTCTCGCCCGGAAAAATCCGTTTTATATTGGCCACATACAGTCTCACTCTGGTCTTCCTGGACCTCTGGCAGAGGGTA | | |
| | ATGATCGCATTGACAGAGCTCTAATAGGAGAAGCCTTAGTTTCAGATCGGGTTGCTTTGGCCCAATGTGATCATGAAAGGTTTCATCTCTCTAGCCATACCCTA | | |
| | AGGCTCCGACATAAGATCACAAAGGAGCAAGCGAGAATGATTGTAAAACAATGTCCTAAATGTATTACTTTATCTCCAGTGCCGCATCTAGGAGTTAATCCTA | | |
| | GAGGCCTTATGCCTAATCATATTTGGCAAATGGATATAACCCATTATGCAGAATTTGGAAAACTAAAATATATACATGTTTGCATTGATACTTGTTCAGGATTT | | |
| | CTTTTTGCTTCTCTGCATACAGGAGAAGCTTCAAAAAACGTAATTGGTCATTGCCTACAAGCATTTAATGCCATGGGATTGCCTAAACTTATTAAGACAGACAA | | |
| | TGGGCCATCTTATTCCAGTAAAAACTTTATTTCATTCTGTAAAGAATTCGGTATTAAACATAAAACTGGAATTCCTTACAACCCCATGGGACAAGGAATAGTTG | | |
| | AACGTGCTCATCGCACCTTAAAGAATTGGCTTTTTAAAACAAAAGAGGGGCAGCTATATCCCCCAAGGTCACCAAAGGCCCACCTTGCCTTCACCTTATTTGTC | | |
| | CTAAATTTCTTGCACACCGATATCAAGGGCCAGTCTGCAGCGGATCGCCACTGGCATCCAGTTACTTCTAATTCTTATGCATTGGTAAAATGGAAGGACCCCCT | | |
| | GACTAATGAATGGAAGGGTCCAGATCCAGTTCTAATTTGGGGTAGGGGCTCAGTTTGTGTTTTTTCACGAGATGAAGATGGAGCGTGGTGGCTGCCAGAGA | | |
| | GATTAATTCGTCAGATGAACACAGATTCTGACTCTTCTGGTAAGTATCATTCGAAAGACTAAAATTCCTTTTGTGCTTAGAATTCAGCTGAGAGCTAAAGCTCC | | |
| | CAAAGCTGTTTTCCAGCTACTCTCTGAGCCAGCTCCCGACAGGAGGCCGGAGACTAGCCTCAGCTTTACAATTTGCATTTGAATAAAGTACCTAGACTTCCCTG | | |
| | AAAGAAGTTCTGCTTTCCTACTTTCTCACTGTCTTTCAAGATTTTGTCTTTCAAGCAGGTAAATCAACACTCTCGAAGCGGACCAGCGGATGTGCATCCCCGCC | | |
| | CCCCTAGAGCACACAGGTGGCTGCTGTTATCTTCTTTCCAAGGACATTTCCAGCACGTGGCTTTCAGTCTGAGTTAAAAATTAGGTTTACCTAGAGGGCTAGA | | |
| | AGAGTAGATATTTCTATATTAATAAAGATTGGTTTTTATTTTGATAGACAGGCTTAGCCCCTTAGCTGACCTCTGGCTTTTCACCCTTGCTGTTACTGCAAGGTG | | |
| | TCCTTAGGCTGTGGAAAAAACAGGGATGAGGAGGAACGACTTCCAGCTCCTATTTTAGCCACAAATCGTGGTGTTACTAACGACATAATTCTTGCTTAGGCTT | | |
| | TGCTAATTCTGAGGTTGATAATTCTCCTTTAGGAGCTGCACAGCACTCAGAACTGTGCATACTGGTTTGTGATTGTACAAATTCAGTATGGGCATCGCTTGGTG | | |
| | CAGAGGTACTGCAAGGGAAGGTCCGGCTTGACCATTTCTGAGTTTCCTGTGAGATAAACCCGGTTTAAAAGAGGTTGGTATCATATTTTGGTTAAAAATCAAA | | |
| | AATATTTTTCGGCTCTGCCTCGCCTCCCCAAAAGATACCCAGAGCCACATGTGTGGGTCTTACCAGTACCCACGGGGGGAATCGGGTCCATGTCCATCCAAGC | | |
| | CAAGGTTAAAAGCCCACTCATCTACGGATGAGAAAATCATTTGATCACCTCAGTTAAGCGTTGCCTTATTTAACTTAATTAATAGGGGGGAGAGAGATTGGAG | | |
| | ACGTACTATTGAAAGGGCAAGCCCTTCACTGCCTCCCACCCAAATAAAAAAGCCAATTGGCCTTGTACTACAAGAGCCGGTCGAACTCCTTCTCCCTGTTTCCC | | |
| | ACCTATCATCCAAAAATGCGGAGGAATATCAACTTAGTGTTATTTTCACATTGTTCAGTCAAACTTAGCCAGAGTTCCAACGCCCTACTTAAAATTCAACTAGA | | |
| | AAGTTACCTACCAAGTACTAATTAGCATTATAAAGTCAGAGTCTGCAGCTCCAGGCCTTTCAGTTAGTTGTTTACTAGAAAGGACAGTCTTAAGCCAGATACA | | |
| | GTTTACCATAAGAAAAGTTAAAGAATCCCAGTGAAGCAAGTTTTTTCTTTAGCCCTAGATTCCAGGCAGAACTATTGAGCATAGATAATTTTCCCCCCTCAGGC | | |
| | CAGCTTTTTCTTTTTTTTAAATTTTGTTAATAAAAGGGAGGAGATGTAGTCTCCCCTGCCCCAGCCTGAAACCTGCTTGCTCGGGGTGGAGCTTCCTGCTCATTC | | |
| | GTTCTGCCACGCCCACTGCTGGAACCTGAGGAGCCACACACGTGCACCTTTCTACTGGACCCGAGATTATTCGGCGGGAATCGAGTCCCCTCCCACTTCCTTC | | |
| | ATAACTAGTGTCCCAACAATAAAATTTGAGCTTTGATCAGAATGAATTTGTCTTAGCTCCGTTTCTTCTTTCGCCCCGTCTAGATTCCTCTCTTACAGCTCGAGTA | | |
| | GCCTTCTCAGTCGAACCATTCATGTTGCGAGCTGCTGGCGGCTGCAACA | | |
| MusD6 | TGTAGTCTCCCCTCCCCCAGCCTGAAACCTGCTTGCTCAGGGGTGGAGCTTCCCGCTCATCGCTCTGCCACGCCCACTGCTGGAACCTGCGGAGCCACACACG | 371 | 7492 |
| | TGCACCTTTCTACTGGACCAGAGATTATTCGGCGGGAATCGGGTCCCCTCCCCCTTCCTTCATAACTAGTGTCCCAACAATAAAATTTGAGCTTTGATCAGAAT | | |
| | GAATTTGTCTTGGCTCCGTTTCTTCTTTCGCCCCGTCTAGATTCCTCTCTTACAGCTCGAGTGGCCTTCTCAGTCGAACCGTTCACGTTGCGAGCTGCTGGCGGC | | |
| | CGCAACATTTTGGCGCCAGAACTGGGACCTGAAGAATGGCAGAGAGATGCTAAGAGGAACGCTGCTTTGGAGCTCCACAGGAAAGGATCTTCGTATCGGAC | | |
| | ATCGGAGCAACGGACAGGTACACATGCTAGCGCTAGCTTAAAATTTCAGTTTTGTAAAGTGTTGCTGAGGATGTGGTAGGATACGAATTAAGCTTGAATCAG | | |
| | TGCTAACCCAACGCTGGTTCTGCTTGGGTCAGCAGCGTGTTAATCGGAACTAGAAACGGAAACAGGCAGGTTAGCCGCAGCTTTTTAGGAAGCTGCTTAGGT | | |
| | GGAAGAAGAAAGGGTTTAAAGTCATGGATCAGGCGGTTGCCCATAGTTTTCAGGAGTTGTTTCAGGCCAGAGGAGTAAGGCTTGAAGTACAATTAGTAAAA | | |
| | AATTTTTTAGGTAAGATAGATAGCTGTTGCCCATGGTTCAAGGAAGAAGAAACACTAGATTGTGGAACCTGGGAGAAAGTTGGTGAGGCCTTAAAAATCACT | | |
| | CAGGCAGATAATTTTACCCTAGGCCTCTGGGCACTCATAAATGATGCAATAAAAGATGCCACTTCCCCAGGGCTAAGTTGCCCCCAGGCGGAGCTTGTGGTAT | | |
| | CTCAGGAGGAGTGCCTGTCAGAGAGGGCCTCCTCAGAAAAAGATCTTCTTAACTCAAAAATTGATAAATGTGGAAACTCGGATGAAAAACTGATTTTTAACA | | |
| | AAAATCACTCAGATAGAGGAGCTGCCCATTACCTTAATGAGAATTGGTCCTCTTGTGAATCTCCTGCTCAACCTGTAGTCCCCACTTCGGGAGGTGCCACTCAT | | |
| | AGGGACACACGACTAAGCGAGTTAGAGTTTGAGATTAAGCTTCAGAGGCTGACTAATGAGCTTCGGGAACTAAAAAAGATGTCAGAAGCGGAGAAGAGTA | | |
| | ACTCTTCTGTAGTTCACCAGGTGCCGCTAGAAAAGGTTGTGAGTCAGGCTCATGGGAAAGGACAGAATATCTCTAATACGCTAGCCTTTCCTGTGGTTGAGGT | | |
| | AGTTGATCAGCAAGATACTAGGGGCAGACATTACCAGACCTTAGATTTCAAGTTGATAAAAGAGTTAAAGGCGGCTGTTGTGCAATATGGCCCTTCAGCCCC | | |
| | ATTCACTCAAGCATTACTGGACACAGTTGTGGAGTCACACTTAACCCCTTTAGATTGGAAGACTCTTTCTAAGGCTACCCTGTCAGGAGGAGATTTTTTGCTTT | | |
| | GGGATTCTGAATGGCGAGACGCCAGTAAGAAAACTGCTGCTTCTAACGCTCAGGCTGGTAATTCAGACTGGGATAGCAACATGCTTTTAGGAGAGGGCCCTT | | |
| | ATGAGGGACAGACAAATCAGATTGATTTTCCCGTTGCAGTGTACGCGCAAATTGCGACGGCCGCACGCCGTGCTTGGGGAAGGTTGCCAGTCAAAGGAGAG | | |
| | ATTGGTGGAAGTTTAGCTAGCATTCGGCAGAGTTCTGATGAACCATATCAGGATTTTGTGGACAGGCTATTGATTTCAGCTAGTAGAATCCTTGGAAATCCGG | | |
| | ACACGGGAAGTCCTTTCGTTATGCAATTGGCTTATGAGAATGCTAACGCAATTTGCCGAGCTGCGATTCAACCGCATAAGGGAACGACAGATTTGGCGGGAT | | |
| | ATGTCCGTCTTTGCGCAGACATCGGGCCTTCCTGCGAGACCTTGCAGGGAACCCACGCGCAGGCAATGTTCTCTAGGAAACGAGGGAATAGTGCATGCTTTA | | |
| | AATGTGGAAGTTTAGATCATTTTAGAATTGATTGTCCTCAGAACAAGGGCGCCGAGGTTAGACAAACAGGCCGTGCCCCGGGAATATGTCCCCGATGTGGAA | | |
| | AGGGCCGCCACTGGGCGAAAGATTGCAAGCATAAAACGAGGGTTTTGAGCCGCCCGGTGCCGGGAAACGAGGAAAGGGGTCAGCCCCAGGCCCCAAGTTA | | |
| | CTCAAAGAAGACAGCTTATGGGGCTCTAAATCTGCTGCCCAGCCAACAAGATCAGTTCTTGAGCTTGTCAGGTCAAACCCAGGAAACGCAAGACTGGACCTC | | |
| | TGTTCCACTGTCCATGCAGCATTAACCCCAGAAGTGGGAGTCCAAACTCTGCCTACCGGAGTCTTTGGACCACTACCTGTAGGAACCTGTGGTTTTCTCTTAGG | | |
| | ACGAAGCAGTTCTATTGTAGAAGGCCTGCAGATTTATCCAGGTGTTATAAGTAATGATTATGAGGGAGAAATTAAAATCATAGCCGCTTGCCCTCGTGGTGCT | | |
| | ATAACTATACCCGCTAATCAGAAAATTGCTCAACTTACCTTGATCCCCTTGCGCTGGTCACTATCTAAATTCTCTAAAAATGAAGAAGGACAGATTAACTTTGA | | |
| | CTCCTCTGGCGTAAATTGGGTGAAATCTATCACTAATCAGAGACCTAACCTTAAATTGATTCTTGATGGAAAAAGCTTTGAAGGATTAATAGATACCGGGGCC | | |
| | GATGTAACCATTATTAGAGGGCAGGACTGGCCCTCAAACTGGCCCCTGTCTGTTTCCTTGACTCACCTTCAAGGAATTGGTTATGCCAGTAACCCAAAACGTA | | |
| | GTTCCAAATTGCTAACCTGGAGAGATGAGGATGGAAAATCAGGAAATATTCAGCCGTATGTTATGCAAAATTTGCCTGTAACCCTGTGGGGAAGAGATCTGT | | |
| | TGTCACAGATGGGCGTTATCCTGTGCAGTTCTAAGGAAATGGTGACTGAACAGACGTTCAGGCAGGGACCCCTGCCTGATCGTGGACTAATAAAGAAGGGA | | |
| | CAGAAAATTAAGACTTTTGAAGATCTTAAACCCCACTCTAACGTGAGAGGTTTAAAGTATTTTCAGTAGTGGCCGCTGTCTTGCCTGCATCCCACGCCGAAAA | | |
| | AATTCAATGGCGTAATGATATTCCGGTGTGGGTAGATCAGTGGTCTTTACCTAAAGAGAAAATAGAGGCCGCTTCTCTGCTAGTGCAGGAGCAGTTAGAAGC | | |
| | AGGACATTTGGTGGAGTCTCATTCTCCCTGGAATACACCCATTTTCATTATCAGGAAGAAATCGGGAAAATGGAGACTGTTGCAAGATTTAAGAAAGGTTAAT | | |
| | GAAACCATGGTACTTATGGGAACTTTACAACCGGGGCTCCCCTCCCCAGTAGCCATTCCTAAGGGATACTATAAGATTGTTATAGATTTGAAAGATTGTTTCTT | | |
| | TACCATCCCTTTGCATCCAGAGGATTGTGAGAGATTTGCTTTTAGTGTTCCTTCTGTAAATTTCAAGGAACCCATGAAAAGATATCAATGGACAGTTCTCCCGC | | |
| | AGGGGATGGCTAATAGTCCCACCTTATGTCAAAAGTTTGTGGCAAAGGCAATTCAGCCTGTTAGACAACAATGGCCAAATATTTACATCATTCATTTCACAGA | | |
| | TGATGTTTTGATGGCGGGAAAGGACCCCCAAGATTTGCTTTTGTGTTATGGAGACTTACGAAAGGCCCTGGCTGATAAGGGATTACAAATTGCTTCTGAAAA | | |
| | GATACAAACTCAGGATCCTTATAATTATTTGGGTTTTAGACTCACTGACCAAGCTGTTTTTCACCAGAAAATTGTTATTCGTAGAGATAACTTAAGGACCTTAA | | |
| | ATGATTTTCAAAAATTGTTAGGTGATATAAACTGGCTTCGCCCCTATCTAAAGCTTACTACAGGGGAGTTGAAACCTTTATTTGATATTCTTAAAGGGAGTTCT | | |
| | GATCCTACTTCCCCTAGATCCCTAACCTCAGAAGGTTTACTGGCCTTACAGCTAGTGGAAAAGGCTATTGAAGAACAGTTTGTCACTTACATAGATTACTCCCT | | |
| | GCCGCTGCACCTGTTAATTTTTAACACGACTCATGTGCCTACGGGATTGCTATGGCAAAAATTTCCTATAATGTGGATACATTCAAGGATTTCTCCCAAACGTA | | |
| | ATATTTTGCCATATCATGAAGCAGTGGCTCAGATGATTATCACTGGAAGAAGGCAGGCATTGACTTATTTTGGAAAGGAGCCAGATATCATTGTCCAGCCTTA | | |
| | CAGCGTGAGTCAGGACACTTGGCTGAAACAGCATAGTACAGATTGGTTGCTTGCACAATTAGGGTTTGAAGGAACTATAGATAGCCACTACCCCCAAGATAG | | |
| | GTTGATAAAATTCTTAAATGTACATGATATGATATTTCCTAAGATGACTTCCTTACAGCCTTTAAATAATGCTCTATTGATTTTTACTGATGGCTCCTCTAAAGG | | |
| | GCGAGCTGGATATCTTATTAGTAATCAACAGGTTATCGTAGAGACTCCTGGTCTCTCGGCTCAGCTCGCCGAACTAACAGCAGTACTGAAGGTTTTTCAGTCT | | |
| | GTACAGGAGGCTTTTAATATTTTTACTGACAGTTTATATGTTGCTCAGTCAGTACCCTTATTGGAAACCTGTGGTACTTTTAACTTCAATACGCCGTCAGGATCT | | |
| | TTATTTTCAGAATTACAAAACATCATTCTCGCCCGGAAAAATCCGTTTTATATTGGCCACATACGGTCTCACTCTGGTCTTCCTGGACCTCTGGCAGAGGGTAA | | |
| | TAATTGCATTGACAGAGCTCTAATAGGAGAAGCCTTAGTTTCAGATCGGGTTGCTTTGGCCCAACGTGATCATGAAAGGTTTCATCTCTCTAGCCATACCCTAA | | |
| | GGCTCCGACATAAGATCACCAAGGAGCAAGCGAGAATGATTGTAAAACAATGTCCTAAATGTATTACTTTATCTCCAGTGCCGCATCTAGGAGTTAATCCTAG | | |
| | AGGCCTTATGCCTAATCATATTTGGCAAATGGATATAACCCATTATGCAGAATTTGGAAAACTAAAATATATACATGTTTGCATTGATACTTGTTCAGGATTTC | | |
| | TCTTTGCTTCTCTGCATACAGGAGAAGCTTCAAAAAACGTAATTGATCATTGCCTACAAGCATTTAATGCCATGGGATTACCTAAACTTATTAAGACAGACAAT | | |
| | GGGCCATCTTATTCCAGTAAAAACTTTATTTCATTCTGTAAAGAATTCGGTATTAAACATAAAACTGGAATTCCTTACAACCCCATGGGACAAGGAATAGTTGA | | |
| | ACGTGCTCATCGCACCTTAAAGAATTGGCTCTTTAAGACAAAAGAGGGGCAGCTATATCCCCCAAGGTCTCCAAAGGCCCACCTTGCCTTCACCTTATTTGTCC | | |
| | TAAATTTCTTGCACACCGATATCAAGGGCCAGTCTGCAGCGGATCGCCACTGGCATCCAGTTACTTCTAATTCTTATGCATTGGTAAAATGGAAGGACCCCCT | | |
| | GACTAATGAATGGAAGGGTCCAGATCCAGTTCTAATTTGGGGTAGAGGCTCAGTTTGTGTTTTTTCACGAGATGAAGATGGAGCACGGTGGCTGCCAGAGA | | |
| | GATTAATTCGTCAGACGAACACAGATTCTGACTCTTCTGGTAAGTATCATTCTAAAGACTAAAATTCCTTTTGTGCTTAAAATTCAGCTGAGAGCAACAGCTCT | | |
| | CAAAGCTGTTCTCCAGCTACTCTCTGAGCCAGCTCCCGACAGGAGGCCGGAGACTAGCCTCAGCTTTACAATTTGCATTTAAATAAAGTACCTAGACTTCCCCG | | |
| | AAAAAAGTTCTGCTTTTCTACTTTCTCACTGTCTTTCAAGATTTTGTCTTTCAAGCAGGTAAATCAACATTCTCGAGGCGGACCAGCGGATGTGCATCCCCGCCC | | |
| | CCCTAGAGCACTCAGGTGGCAGCTGTTATCCCCAGTCTCAGGACATTCCAGCATGTGGCCTTCAGTCTGAGTTAAAAATTAGGTTTACCCAGAGGACTAGAAT | | |
| | AGTAGATATTTCTATATTAATAAAGATTGGTTTTTATTTTGATAGACAGGCTTAGCCCCTTAGCTGACCTCTGGCTTTTCACCCTTGCTGTTACTGCAAGGTGTC | | |
| | TTTAGCTCAATAAGGCTGTGGAAAAAAACAGGGATGAGGAGGAACGGCTCCCAGCTCCTATTTTAGCCACAAATCGTGGTGTTACTAACGACATAATTCTTGC | | |
| | TTAGGCTTTGCTAAATCTGAGGTTGATAATTCTCCTTTAGGAGCTGCACAGCGCTCAGAACTGTGCATACTGATTTGTGATGGTACAAATTCAGTATGGGCATC | | |
| | GCTTGGTGCAGATGGAGGTACTGCAAGGAAAGGTCCCAGCTTGACCATTTCTGAGTTTCCTGTGAGATAAACCCGGTTTGAAAGAGGTTGGTACCAAATTAT | | |
| | ATATCCCTCGGCTCTACCTCGCCTCCCCAAAAGGTACCAGAGCCACAGGTGTGGATTTTAACAGAATCCACGGGAGGAATCGGGTCCATGTCCACCCAAGCCA | | |
| | AGGTTAAAAGCCCACTCATCTACGGATGAGAAAATCATTTGATCACCTCAGTTAAGCGCTGCCTTATTTTAACTTAATTAATAGGGGGGAGAGAGATTGGAGA | | |
| | CTTACTATTGAAAGGGCAAGCCCTTCACTGCCTCCCACCCAAATAAAAAAGCCAATTGGCCTTGTACTACAGAGCTGGCCGGACCCCTTATCCCTGTTACCCAC | | |
| | CAATCATCCAAAAATGCGGAGGAATATCAACTTAGTGTTATTCTTATTATAGTGTATTTCACACTTGTTCAGTCAAACTTAGCCAGAGTTCCAACGCCCTACTTA | | |
| | AAATTCAACTAGAAAGTTACCTACCAAGTACTAATTAGCATTATAAAGTCAGAGCCTACAGCTCCAGGCTTTTCAGTTAGTTGTTTACTAAGATAAGAAAAGAC | | |
| | AGTCTTAGCCAGATACAGTTTACCATAATAAAAGTTAAAGAATCCCAGGGAAGCAAGTTTTTTCTTTTAGCCCTAGATTCCAGGCAGAACTATTGAGCATAGA | | |
| | TAATTTTTCCCCCTCAGGCCAGCTTTTTCTTTTTTTTTAATTTTGTTAATAAAAGGGAGGAGATGTAGTCTCCCCTCCCCCAGCCTGAAACCTGCTTGCTCAGGG | | |
| | GTGGAGCTTCCCGCTCATCGCTCTGCCACGCCCACTGCTGGAACCTGCGGAGCCACACACGTGCACCTTTCTACTGGACCAGAGATTATTCGGCGGGAATCG | | |
| | GGTCCCCTCCCCCTTCCTTCATAACTAGTGTCCCAACAATAAAATTTGAGCTTTGATCAGAATGAATTTGTCTTGGCTCCGTTTCTTCTTTCGCCCCGTCTAGATT | | |
| | CCTCTCTTACAGCTCGAGTGGCCTTCTCAGTCGAACCGTTCACGTTGCGAGCTGCTGGCGGCCGCAACA | | |
| MusD7 | TGTAGTCTCCCCTCCCCCAGCCTGAAACCTGCTTGCTCGGGGTGGAGCTTCCTGCTCATTCGTTCTGCCACGCCCACTGCTGGAACCTGAGGAGCCACACACGT | 372 | 7450 |
| | GCACCTTTCTACTGGACCCGAGATTATTCGGCGGGAATCGGGTCCCCTCCCCCTTCCTTCATAACTAGTGTCCCAACAATAAAATTTGAGCTTTGATCAGAATG | | |
| | AATTTGTCTTAGCTCCGTTTCTTCTTTCGCCCCGTCTAGATTCCTCTCTTACAGCTCGAGTGGCCTTCTCAGTCGAACCGTTCACGTTGCGAGCTGCTGGCGGCC | | |
| | GCAACATTTTGGCGCCAGAACTGGGACCTGAAGAATGGCAGAGAGATGCTAAGAGGAACGCTGCATTGGAGCTCCACAGGAAAGGATCTTCGTATCGGACA | | |
| | TCGGAGCAACGGACAGGTACACATGCTAGCGCTAGCTTAAAATTTCAGTTTTGTAAAGTGATGCTGAGGATGCGGTAGGATACGAATTAAGCTTGAATCAGT | | |
| | GCTAACCCAACGCTGGTTCTGCTTGGGTCAGCAGCGTGTTAATCGGAACTAGAAACAGAAACAGGCAGGTTAGCCGCAGCTTTTTAGGAAGCTGCTTAGGTG | | |
| | GAAGAAGAAAGGGTTTAAAGTCATGGATCAGGCGGTTGCCCATAGTTTTCAGGAGTTGTTTCAGGCCAGAGGAGTAAGGCTTGAAGTACAATTAGTAAAAA | | |
| | AATTTTTAGGTAAGATAGATAGCTGTTGCCCATGGTTCAAGGAAGAAGAAACACTAGATTGTGGAACCTGGGAGAAAGTTGGTGAGGCCTTAAAAATCACTC | | |
| | AGGCAGATAATTTTACCCTAGGCCTCTGGGCGCTCGTAAATGATGCAATAAAAGATGCCACTTCCCCAGGGCTAAGTTGCCCCCAGGCGGAGCTTGTGGTAT | | |
| | CTCAGGAGGAGTGCCTGTCAGAGAGGGCCTCCTCAGAAAAAGATCTTCTTAACTCAAAAATTGATAAATGTGGAAACTCGGATGAAAAACTGATTTTTAACA | | |
| | AAAATCACTCAGATAGAGGAGCTGCCCATTACCTTAATGAGAATTGGTCCTCTTGTGAATCTCCCGCTCCACCTGTAGTCCCCACTTCGGGAGGTGCCACTCAT | | |
| | AGGGACACACGACTAAGCGAGTTAGAGTTTGAGATTAAGCTTCAGAGGCTGACTAATGAGCTTCGGGAACTAAAAAAGATGTCAGAAGCGGAGAAGAGTA | | |
| | ACTCTTCTGTAGTTCACCAGGTGCCGCTAGAAAAGGTTGTGAGTCAGGCTCGTGGGAAAGGACAGAATATGTCTAATACGCTAGCCTTTCCGGTGGTCGAGG | | |
| | TAGTTGATCAGCAAGATACTAGGGGCAGACATTACCAGACCTTAGATTTCAAGTTGATAAAAGAGTTAAAGGCGGCTGTTGTGCAATATGGCCCTTCAGCCC | | |
| | CATTCACTCAAGCATTACTGGACACAGTTGTGGAGTCACACTTAACCCCTTTAGATTGGAAGACTCTTTCTAAGGCTACCCTGTCAGGAGGAGATTTTTTGCTT | | |
| | TGGGATTCTGAATGGCGAGACGCCAGTAAGAAAACTGCTGCTTCTAACGCTCAGGGTGGTAATTCAGACTGGGATAGCAACATGCTTTTAGGAGAGGGCCC | | |
| | TTATGAGGGACAGATAAATCAGATTGATTTTCCCGTTGCAGTGTACGCGCAAATTGCGACGGCCGCACGCCTTGCTTGGGGAAGATTGCCAGTCAAAGGAGA | | |
| | GATTGGTGGAAGTTTAGCTAGCATTCGGCAGAGTTCTGATGAACCATATCAGGATTTTGTGGACAGGCTATTGATTTCAGCTAGTAGAATCCTTGGGAATCCG | | |
| | GACACGGGAAGTCCTTTCGTTATGCAATTGGCTTATGAGAATGCTAATGCAATTTGCCGAGCTGCGATTCAACCGCATAAGGGAACGACAGATTTGGCGGGA | | |
| | TATGTCCGCCTTTGCGCAGACATCGGGCCTTCCTGCGAGACCTTGCCGGGAACCCACGCGCAGGCAATGTTCTCAAGGAAACGAGGGAAAAATGTATGCTTT | | |
| | AAGTGTGGAAGTTTAGATCATTTTAGAATTGATTGTCCTCAGAACAAGGGTGCCGAGGTTAGACAAACAGGCCGTGCCCCAGGAATATGTCCCCGGTGTGGG | | |
| | AAGGGCCGCCACTGGGCAAAAGATTGTAAGCATAAAACGAGGGTTTTGAGCCGCCCAGTGCCGGGAAACGAGGAAAGGGGTCAGCCCCAGGCCCCGAGTT | | |
| | ACTCAAAGAAGACAGCTTATGGGGCTATAAATCTGCTGCCCAGCCAACAAGATCAGTTCTTGAGCTTGTCAGGTCAAACCCAGGAAATGCAAGACTGGACCT | | |
| | CTGTTCCACTGTCCATGCAGCATTAACCCCAGAAGTGGGAGTCCAAACTCTGCCTACCGGAGTCTTTGGACCACTACCTGTAGGAACCTGTGGTTTTCTCTTAG | | |
| | GACGAAGCAGTTTTATTGTAGAAGGCCTGCAGCTTTATCCAGGTGTTATAAGTAATGATTATGAGGGAGAAATTAAAATCATAGCCGCTTGCCCTCGTGGTGC | | |
| | TATAACTATACCCGCTAATCAGAAAATTGCTCAACTTACTTTGATCCCTTTGCGCTGGTCACTATCTAAATTCTTTGAAAATGAAGAAGGACAGAATAACTTTG | | |
| | ACTCCTCTGGCGTAAATTGGGTGAAATCTATCACCAATCAGAGACCTAACCTTAAATTGATTCTTGATGGAAAAAGCTTTGAAGGATTAATAGATACCGGGGC | | |
| | CGATGTAACGATTATTAGAGGGCAGGACTGGCCCTCAAACTGGCCCCTGTCTGTTTCCTTGACTCACCTTCAAGGAATTGGTTATGCCAGTAACCCAAAACGT | | |
| | AGTTCCAAATTGCTAACCTGGAGAGATGAGGATGGAAAATCAGGAAATATTCAGCCGTATGTTATGCCAAATTTGCCTGTGACCCTGTGGGGAAGAGATCTG | | |
| | TTGTCACAGATGGGCGTTATCCTGTGCAGTTCTAAGGAGATGGTGACTGAACAGACGTTCAGGCAGGGACCCCTGCCTGATCGTGGACTAATAAAGAAGGG | | |
| | ACAGAAAATTAAGACTTTTGAGGATCTTAAACCCCACTCTAACGTGAGAGGTTTAAAGTATTTTCAGTAGCGGCCACTGTCTTGCCTGCATCCCACGCCGAAA | | |
| | AAATTCAATGGCGTAATGATATTCCGGTGTGGGTAGATCAGTGGTCTTTACCTAAAGAGAAAATAGAGGCCGCTTCTTTGCTAGTGCAGGAGCAGTTAGAAG | | |
| | CAGGACATTTGGTGGAGTCTCACTCTCCCTGGAATACACCCATTTTCATTATCAGGAAGAAATCGGGAAAATGGAGACTGTTGCAAGATTTAAGAAAGGTTA | | |
| | ATGAAACCATGGTACTTATGGGAACTTTACAACCGGGGCTCCCCTCCCCAGTAGCCATTCCTAAGGGATATTATAAGATTGTTATAGATTTGAAAGATTGTTTC | | |
| | TTTACCATCCCTTTGCATCCAAAGGATTGTGAGAGATTTGCTTTTAGTGTTCCTTCTGTAAATTTCAAGGAACCCATGAAAAGATATCAATGGACAGTTCTCCC | | |
| | GCAGGGCATGGCTAATAGTCCCACCTTATGTCAAAGGTTTGTGGCAAAGGCAATTCAGCCTGTTAGACAACAATGGCCAAATATTTACATCATTCATTTCACA | | |
| | GATGATGTCTTGATGGCGGGAAAGGACCCCCAAGATTTGCTTTTGTGTTATGGAGACTTACGAAAGGCCCTGGCTGATAAGGGATTACAAATTGCTTCTGAA | | |
| | AAGATACAAACTCAGGATCCTTATAATTATTTGGGTTTTAGACTCACTGATCAAGCTGTTTTTCCCCAGAAAATTGTTATTTGTAGAGATAACTTAAGGACCTTA | | |
| | AATGATTTTCAAAAATTGTTAGGTGATATAAATTGGCTTCGCCCCTATGTAAAGCTTACTACAGGGGAGTTGAAACCTTTATTTGATATTCTTAAAGGGAGTTC | | |
| | TGATCCCACTTCCCCTAGATCCCTAACCTCAGAAGGATTACTGGCCTTACAGCTAGTGGAAAAGGCTATTGAAGAACAGTTTGTCACTTACATAGATTACTCCC | | |
| | TGCCGCTGCACCTGTTAATTTTTAATACGACTCATGTGCCTACGGGATTGCTATGGCAAAAATTTCCTATAATGTGGATACATTCGAGGATTTCTCCCAAACGT | | |
| | AATATCTTGCCATATCATGAAGCAGTGGCTCAGATGATTATCACTGGAAGAAAGCAGGCATTGACTTATTTTGGAAAGGAGCCAGATATCATTGTCCAGCCTT | | |
| | ACAGCGTGAGTCAGGACACTTGGCTGAAACAGCATAGTACAGATTGGTTGCTTGCACAATTAGGGTTTGAAGGAACTGTAGATAGCCACTACCCCCAAGATA | | |
| | GGTTGATAAAATTCTTAAATGTACATGATATGATATTTCCTAAGATGACTTCCTTACAGCCTTTAAATAATGCTCTATTGATTTTTACTGATGGCTCCTCTAAAG | | |
| | GGCGAGCTGGATATCTTATTAGTAATCAACAGGTTATCGTAGAGACTCCTGGTCTCTCGGCTCAGCTCGCCGAATTAACAGCAGTACTGAAGGTTTTTCAGTC | | |
| | TGTACATGAGGCTTTTAATATTTTTACTGACAGTTTATATGTCGCTCAGTCAGTACCCTTATTGGAAACCTGTGGTACGTTTAACTTCAATACGCCGTCAGGATC | | |
| | TTTATTTTCAGAATTACAAAACATCATTCTCGCCCGGAAAAATCCGTTTTATATTGGCCACATACGGTCTCACTCTGGTCTTCCTGGACCTCTGGCAGAGGGTA | | |
| | ATGATCGCATTGACAGAGCTCTAATAGGAGAAGCCTTAGTTTCAGATCGGGTTGCTTTGGCCCAACGTGATCACAAAAGGTTTCATCTTTCTAGCCATACCCTA | | |
| | AGGCTCCGACATAAGATCACAAAGGAGCAAGCGAGAATGATCGTAAAACAATGTCCTAAAAGTATTACTTTATCTCCAGTGCTGCATCTAGGAGTTAATCCTA | | |
| | GAGGCCTTATGCCTAATCATATTTGGCAAATGGATATAACCCATTATGCAGAATTTGGAAAACTAAAATATATACATGTTTGCATTGATACTTGTTCAGGATTT | | |
| | CTTTTTGCTTCTCTGCATACAGGAGAAGCTTCAAAAAACGTAATTGATCATTGCCTACAAGCATTTAATGCCATGGGATTGCCTAAACTTATTAAGACAGACAA | | |
| | TGGGCCATCTTATTCCAGTAAAAACTTTATTTCATTCTGTAAAGAATTCGGTATTAAACATAAAACTGGAATTCCTTACAACCCCATGGGACAAGGAATAGTTG | | |
| | AACGTGCTCATCGCACCTTAAAGAATTGGCTTTTTAAGACAAAAGAGGGGCAGCTATATCCCCCAAGGTCACCAAAGGCCCACCTTGCCTTCACTTTATTTGTC | | |
| | CTAAATTTCTTGCACACCGATATCAAGGGCCAGTCTGCAGCGGATCGCCACTGGCATCCAGTTACTTCAAATTCTTATGCATTGGTAAAATGGAAGGACCCCC | | |
| | TGACTAATGAATGGAAGGGTCCAGATCCAGTTCTAATTTGGGGTAGGGGCTCAGTTTGTGTTTTTTCACGAGATGAAGATGGAGCGCGATGGCTGCCAGAG | | |
| | AGATTAATTCGTCAGATGAACACAGATTCTGACTCTTCTGGTAAGTATCATTCTAAAGACTAAAATTCCTTTTGTGCTTAAAATTCAGCTGAGAGCAACAGCTC | | |
| | TCAAAGCTGTTCTCCAGCTACTCTCTGAGCCAGCTCCCGACAGGAGGCCGGAGACTAGCCTCAGCTTTACAATTTGCATTTGAATAAAGTACCTAGACTTCCCC | | |
| | GAAAGAAGTTCTGCTTTCCTACTTTCTCGCTGTCTTTCAAGATTTTGTCTTTCAAGCAGGTAAATCAACATTCTCGAGGCAGACCAGCGGATGTGCATCCCCGC | | |
| | CCCCCTAGAGCACACAGGTGGCAGCTGTTATCCCCAGTCTCAGGACATTTCCAGCACGTGGTTTTCAGTCTGAGTTAAAAATTTAGGTTTACCTAGAGGGCTA | | |
| | GAAGAGTAGATATTTCTATATTAATAAAGATTGGTTTTTATTTTGATAGACAGGCTTAGCCCCTTAGCTGACCTCTGGCTTTTCACCCTTGCTGTTACTGCAAGG | | |
| | TGTCCTTAGCTCAATAGGCTGTGGAAAAAACAGGGATGAGGAGGAACGACTTCCAGCTCCTATTTTAGCCACAAATCGTGGTGTTACTAACGACATAATTCTT | | |
| | GCTTAGGCTTTGCTAATTCTGAGGTTGATAATTCTCCTTTAGGAGCTGCACAGCACTCAGAACTGTGCATACTGGTTTGTGATTGTACAAATTCAGTATGGGCA | | |
| | CCGCTTGGTGCAGAGGTACTGCAAGGGAAGGTCCGGCTTGACCATTTCTGAGTTTCCTGTGAGATAAACCCGGTTTAAAAGAGGTTGGTATCATATTTTGGTT | | |
| | AAAAATAAAAAATATTTTCCGGCTCTACCTCACCTCCCCAAAAGGTACCGAGAGCCACATGTGTGGGTTTTACCCACGGGAGGAATCGGGTCCATGTCCACCC | | |
| | AAGCCAAGGTTAAAAGCCCACTCATCTACGGATGAGAAAATCATTTGATCACCTCAGTTAAGCATTGCCTTATTTAACTTAATTAATAGGGGGGAGAGAGATT | | |
| | GGAGACGTACTATTGAAAGGGCAAGCCCTTCACTGCCTCCCACCCAAATAAAAGAGCCGGTCGAACTCCTTCTCCCTGTTTCCCACCTATCATCCAAAAATGCG | | |
| | GAGGAATATCAACTTAGTGTTATTTTCACATTGTTCAGTCAAACTTAGCCAGAGTTCCAACGCCCTACTTAAAATTCAACTAGAAAGTTACCTACCAAGTACTA | | |
| | ATTAGCATTATAAAGTCAGAGTCTGCAGCTCCAGGCCTTTCAGTTAGTTGTTTACTAGAAAGGACAGTCTTAAGCCAGATACAGTTTACAATAAGAAAAGTTA | | |
| | AAGAATCCCAGTGAAGCAAGTTTTTTCTTTAGTCCTAGATTCCAGGCAGAACTATTGAGCATAGATAATTTTCCCCCCTCAGGCCAGCTTTTTCTTTTTTTAAAT | | |
| | TTTGTTAATAAAAGGGAGGAGATGTAGTCTCCCCTCCCCCAGCCTGAAACCTGCTTGCTCGGGGTGGAGCTTCCTGCTCATTCGTTCTGCCACGCCCACTGCTG | | |
| | GAACCTGAGGAGCCACACACGTGCACCTTTCTACTGGACCCGAGATTATTCGGCGGGAATCGGGTCCCCTCCCCCTTCCTTCATAACTAGTGTCCCAACAATA | | |
| | AAATTTGAGCTTTGATCAGAATGAATTTGTCTTAGCTCCGTTTCTTCTTTCGCCCCGTCTAGATTTCTCTCTTACAGCTCGAGTGGCCTTCTCAGTCGAACCGTTC | | |
| | ACGTTGCGAGCTGCTGGCGGCCGCAACA | | |
| MusD8 | TGTAGTCTCCCCTCCCCTAGCCTGAAACCTGCTTGCTCGGGGTGGAGCTTCCTGCTCATTCGTTCTGCCACGCCCACTGCTGGAACCTGAGGAGCCACACACGT | 373 | 7456 |
| | GCACCTTTCTACTGGACCAGAGATTATTCGGCGGGAATCGGGTCCCCTCCCCCTTCCTTCATAACTAGTGTCGCAACAATAAAATTGGAGCTTTGATCAGAATG | | |
| | AAATTGTCTTAGCTCCGTTTTTTCTTCCGCCCTGTCTAGATTCCTCTCTTACAGCTCGAGCGGCCTTCTCAGTCGAACCGTTCACGTTGCGAGCTGCTGGCAGCC | | |
| | GCAACATTTTGGCGCCAGAACTGGGACCTGAAGAATGGCAGAGAGATGCTAAGAGGAACGCTGCATTGGAGCTCCACAGGAAAGGATCTTCGTATCGGACA | | |
| | TCGGAGCAACGGACAGGTACACATGCTAGCGCTAGCTTAAAATTTCAGTTTTGTAAAGTGTTGCTGAGGATGCGGTAGGATACGAATTAAGCTTGAATCAGT | | |
| | GCTAACCCAACGCTGGTTCTGCTTGGGTCAGCAGCGTGTTAATCGGAACTAGAAACGGAAACAGGCAGGTTAGCCGCAGCTTTTTAGGAAGCTGCTTAGGTG | | |
| | GAAGAAGAAAGGGTTTAAAGTCATGGATCAGGCGGTTGCTCATAGTTTTCAGGAGTTGTTTCAGGCCAGAGGAGTAAGGCTTGAAGTACAATTAGTAAAAA | | |
| | ATTTTTTAGGTAAGATAGATAGCTGTTGCCCATGGTTCAAGGAAGAAGAAACACTAGATTGTGGAACCTGGGAGAAAGTTGGTGAGGCCTTAAAAATCACTC | | |
| | AGGCAGATAATTTTACCCTAGGCCTCTGGGCGCTCGTAAATGATGCAATAAAAGATGCCACTTCCCCAGGGCTAAGTTGCCCCCAGGCGGAGCTTGTGGTAT | | |
| | CTCAGGAGGAGTGCCTGTCAGAGAGGGCCTCCTCAGAAAAAGATCTTCTTAACTCAAAAATTGATAAATGTGGAAACTCGGATGAAAAACTGATTTTTAACA | | |
| | AAAATCACTCAGATAGAGGAGCTGCCCATTACCTTAATGAGAATTGGTCCTCTTGTGAATCTCCCGCTCCACCTGTAGTCCCCACTTCGGGAGGTGCCACTCAT | | |
| | AGGGACACACGACTAAGCGAGTTAGAGTTTGAGATTAAGCTTCAGAGGCTGACTAATGAGCTTCGGGAACTAAAAAAGATGTCAGAAGCAGAGAAGAGTA | | |
| | ACTCTTCTGTAGTTCACCAGGTGCCGCTAGAAAAGGTTGTGAGTCAGGCTCGTGGGAAAGGACAGAATATGTCTAATACGCTAGCCTTTCCGGTGGTCGAGG | | |
| | TAGTTGATCAGCAAGATACTAGGGGCAGACATTACCAGACCTTAGATTTCAAGTTGATAAAAGAGTTAAAGGCGGCTGTTGTGCAATATGGCCCTTCAGCCC | | |
| | CATTCACTCAAGCATTACTGGACACAGTTGTGGAGTCACACTTAACCCCTTTAGATTGGAAGGCTCTTTCTAAGGCTACCCTGTCAGGAGGAGATTTTTTGCTT | | |
| | TGGGATTCTGAATGGCGAGACGCCAGTAAGAAAACTGCTGCTTCTAACGCTCAGGCTGGTAATTCAGACTGGGATAGCAACATGCTTTTAGGAGAGGGCCCT | | |
| | TATGAGGGACAGACAAATCAGATTGATTTTCCCGTTGCAGTGTACGCGCAAATTGCGACGGCCGCACGCCGTGCTTGGGGAAGGTTGCCAGTCAAAGGAGA | | |
| | GATTGGTGGAAGTTTAGCTAGCATTCGGCAGAGTTCTGATGAACCATATCAGGATTTTGTGGACAGGCTATTGATTTCAGCTAGTAGAATCCTTGGGAATCCG | | |
| | GACATGGGAAGTCCTTTCGTTATGCAATTGGCTTATGAGAATGCTAATGCAATTTGCCGAGCTGCGATTCAACCGCATAAGGGAACGACAGATTTGGCGGGA | | |
| | TATGTCCGCCTTTGCGCAGACATCGGGCCTTCCTGCGAGACCTTGCAGGGAACCCACGCGCAGGCAATGTTCTCAAGGAAACGAGGGAAAAATGTATGCTTT | | |
| | AAGTGTGGAAGTTTAGATCATTTTAGAATTGATTGTCCTCAGAACAAGGGTGCCGAGGTTAGACAAACAGGCCGTGGCCCAGGAATATGTCCCCGATGTGGA | | |
| | AAGGGCCGCCACTGGGCAAAAGATTGTAAGCATAAAACGAGGGTTTTGAGCCGCCCGGTGCCGGGAAACGAGGAAAGGGGTCAGCCCCAGGCCCCGAGTT | | |
| | ACTCAAAGAAGACAGCTTATGGGGCTATAAATCTGCTGCCCAGCCAACAAGATCAGTTCTTGAGCTTGTCAGGTCAAACCCAGGAAATGCAAGACTGGACCT | | |
| | CTGTTCCACTGTCCATGCAGCATTAACCCCAGAAGTGGGAGTCCAAACTCTGCCTACCGGAGTTTTTGGACCACTACCTGTAGGAACCTGTGGTTTTCTCTTAG | | |
| | GACGAAGCAGTTCTATTGTAGAAGGCCTGCAGATTTATCCAGGTGTTATAAGTAATGATTATGAGGGAGAAATTAAAATCATAGCCGCTTGCCCTCGTGGTG | | |
| | CTATAACTATACCCGCTAATCAGAAAATTGCTCAACTTACTTTGATCCCTTTGCGCTGGTCACTATCTAAATTCTTTGAAAATGAAGAAAGACAGAATAACTTTG | | |
| | ACTCCTCTGGCGTAAATTGGGTGAAATCTATCACCAATCAGAGACCTAACCTTAAATTGATTCTTGATGGAAAAAGCTTTGAAGGATTAATAGATACCGGGGC | | |
| | CGATGTAACGATTATTAGAGGGCAGGACTGGCCCTCAAACTGGCCCCTGTCTGTTTCCTTGACTCACCTTCAAGGAATTGGTTATGCCAGTAACCCAAAACGT | | |
| | AGTTCCAAATTGCTAACCTGGAGAGATGAGGATGGAAAATCAGGAAATATTCAGCCGTATGTTATGCCAAATTTGCCTGTAACCCTGTGGGGAAGAGATCTG | | |
| | TTGTCACAGATGGGCGTTATCCTGTGCAGTTCTAAGGAGATGGTGACTAAACAGACGTTCAGGCAGGGACCCCTGCCTGATCGTGGACTAATAAAGAATGGA | | |
| | CAGAAAATTAAGACTTTTGAGGATCTTAAACCCCACTCTAACGTGAGAGGTTTAAAGTATTTTCAGTAGCGGCCACTGTCTTGCCTGCATCCCACGCCGAAAA | | |
| | AATTCAATGGCGTAATGATATTCCGGTGTGGGTAGATCAGTGGTCTTTACCTAAAGAGAAAATAGAGGCCGCTTCTTTGCTAGTGCAGGAGCAGTTAGAAGC | | |
| | AGGACATTTGGTGGAGTCTCACTCTCCCTGGAATACACCCATTTTCATTATCAGGAAGAAATCGGGAAAATGGAGACTGTTGCAAGATTTAAGAAAGGTTAAT | | |
| | GAAACCATGGTACTTATGGGAACTTTACAACCGGGGCTCCCCTCCCCAGTAGCCATTCCTAAGGGATATTATAAGATTGTTATAGATTTGAAAGATTGTTTCTT | | |
| | TACCATCCCTTTGCATCCAAAGGATTGTGAGAGATTTGCTTTTAGTGTTCCTTCTGTAAATTTCAAGGAACCCATGAAAAGATATCATTGGACAGTTCTCCCGC | | |
| | AGGGCATGGCTAATAGTCCCACCTTATGTCAAAGGTTTGTGGCAAAGGCAATTCAGCCTGTTAGACAACAATGGCCAAATATTTACATCATCCATTTCACAGA | | |
| | TGATGTCTTGATGGCGGGAAAGGACCCCCAAGATTTGCTTTTGTGTTATGGAGACTTACGAAAGGCCCTGGCTGATAAGGGATTACAAATTGCTTCTGAAAA | | |
| | GATACAAACTCAGGATCCTTATAATTATTTGGGTTTTAGACTCACTGATCAAGCTGTTTTTCCCCAGAAAATTGTTATTCGTAGAGATAACTTAAGGACCTTAA | | |
| | ATGATTTTCAAAAATTGTTAGGTGATATAAATTGGCTTCGCCCCTATCTAAAGCTTACTACAGGGGAGTTGAAACCTTTATTTGATATTCGTAAAGGGAGTTCT | | |
| | GATCCCACTTCCCCTAGATCCCTAACCTCAGAAGGATTACTGGCCTTACAGCTAGTGGAAAAGGCTATTGAAGAACAGTTTGTCACTTACATAGATTACTCCCT | | |
| | GCCGCTGCACCTGTTAATTTTTAATACGACTCATGTGCCTACGGGATTGCTATGGCAAAAATTTCCTATAATGTGGATACATTCGAGGATTTCTCCCAAACGTA | | |
| | ATATCTTGCCATATCACGAAGCAGTGGCTCAGATGATTATCACTGGAAGAAGGCAGGCATTGACTTATTTTGGAAAGGAGCCAGATATCATTGTCCAGCCTTA | | |
| | CAGCGTGAGTCAGGACACTTGGCTGAAACAGCATAGTACAGATTGGTTGCTTGCACAATTAGGGTTTGAAGGAACTCTAGATAGCCACTACCCCCAAGATAG | | |
| | GTTGATAAAATTCTTAAATGTGCATGATATGATATTTCCTAAGATGACTTCCTTACAGCCTTTAAATAATGCTCTATTGATTTTTACTGATGGCTCCTCTAAAGG | | |
| | GCGAGCTGGATATCTTATTAGTAATCAACAGGTTATCGTAGAGACTCCTGGTCTCTCGGCTCAGCTCGCTGAATTAACAGCAGTACTGAAGGTTTTTCAGTCT | | |
| | GTGCATGAGGCTTTTAATATTTTTACTGACAGTTTATATGTTGCTCAGTCAGTACCCTTATTGGAAACCTGTGGTACGTTTAACTTCAATACGCCGTCAGGATCT | | |
| | TTATTTTCAGAATTACAAAACATCATTCTCGCCCGGAAAAATCCGTTTTATATTGGCCACATACGGTCTCACTCTGGTCTTCCTGGACCTCTGGCAGAGGGTAA | | |
| | TGATCGCATTGACAGAGCTCTAATAGGAGAAGCCTTAGTTTCAGATCGGGTTGCTTTGGCCCAACGTGATCACGAAAGGTTTCATCTTTCTAGCCATACCCTA | | |
| | AGGCTCCGACATAAGATCACAAAGGAGCAAGCGAGAATGATCGTAAAACAATGTCCTAAATGTATTACTTTATCTCCAGTGCCGCATCTAGGAGTTAATCCTA | | |
| | GAGGCCTTATGCCTAATCATATTTGGCAAATGGATATAACCCATTATGCAGAATTTGGAAAACTAAAATATATACATGTTTGCATTGATACTTGTTCAGGATTT | | |
| | CTTTTTGCTTCTCTGCATACAGGAGAAGCTTCAAAAAACGTAATTGATCATTGCCTACAAGCATTTAATGCCATGGGATTGCCTAAACTTATTAAGACAGACAA | | |
| | TGGGCCATCTTATTCCAGTAAAAACTTTATTTCATTCTGTAAAGAATTCGGTATTAAACATAAAACTGGAATTCCTTACAACCCCATGGGACAAGGAATAGTTG | | |
| | AACGTGCTCATCGCACCTTAAAGAATTGGCTTTTTAAGACAAAAGAGGGTCAGCTATATCCCCCAAGGTCACCAAAGGCCCACCTTGCCTTCACTTTATTTGTC | | |
| | CTAAATTTCTTGCACACCGATATCAAGGGCCAGTCTGCAGCGGATCGCCACTGGCATCCAGTTACTTCTAATTCTTATGCATTGGTAAAATGGAAGGACCCCCT | | |
| | GACTAATGAATGGAAGGGTCCAGATCCAGTTCTAATTTGGGGTAGGGGCTCAGTTTGTGTTTTTTCACGAGATGAAGATGGAACGCGGTGGCTGCCAGAGA | | |
| | GATTAATTCGTCAGATGAACACAGATTCTGACTCTTCTGGTAAGTATCATTCTAAAGACTAAAATTCCTTTTGTGCTTAAAATTCAGCTGAGAGCAACAGCTCT | | |
| | CAAAGCTGTTCTCCAGCTACTCTCTGAGCCAGCTCCCGACAGGAGGCCGGAGACTAGCCGCAGCTTTACAATTTGCATTTGAATAAAGTACCTAGACTTCCCC | | |
| | GAAAGAAGTTCTGCTTTCCTACTTTCTCACTGTCTTTCAAGATTTTGTCTTTCAAGCAGGTAAATCAACATTCTCGAGGTGGACCAGTGGATGTGCATCCCCGC | | |
| | CCCCCTAGAGCACACAGGTGGCAGCTGTTACCCCCAGTCTCAGGACATTTCCAGCACGTGGTTTTCAGTCTGAGTTAAAAATTTAGGTTTACCTAGAGGGCTA | | |
| | GAAGAGTAGATATTTCTGTATTTATAAAGATTGGTTTTTATTTTGATAGACAGGCTTAGCCCCTTAGCTGACCTCTGGCTTTTCACCCTTGCTGTTACTGCAAGG | | |
| | TGTCCTTAGCTCAATAGGCTGTGGAAAAAACAGGGATGAGGAGGAACGACTTCCAGCTCCTATTTTAGCCACAAATCGTGGTGTTACTAACGACATAATTCTT | | |
| | GCTTAGGCTTTGCTAATTCTGAGGTTGATAATTCTCCTTTAGGAGCTGCACAGCACTCAGAACTGTGCATACTGGTTTGTGATTGTACAAATTCAGTATGGGCA | | |
| | CCGCTTGGTGCAGAGATACTTACTGCAAGGGAAGGTCCGGCTTGACCATTTCTGAGTTTCCTGTGAGATAAACCCGGTTTGAAAGAGGTTGGTACCAAATTTT | | |
| | GGTTAAAAATAAAAAATATTTTCCGGCTCTACCTCGCCTCCCCAAAAGGTAGCGAGAGCCACATGTGTGGGTTTTACCCACAGGAGGAATCGGGTCCATGTCC | | |
| | ACCCAAGCCAAGGTTAAAAGCCCACTCATCTACGGATGAGAAAATCATTTGATCACCTCAGTTAAGCGTTGCCTTATTTAACTTAATTAATAGGGGGGGAGAG | | |
| | AGATTGGAGACGTACTATTGAAAGGGCAAGCCCTTTACTGCCTCCCACCCAAATAAAAGAGCCGGTCGAACGCCTTCTCCCTGTTTCCCACCTATCTTCCAAAA | | |
| | ATGCGGAGGAATATCAACTTAGTGTTATTTTCACATCGTTCAGTCAAACTTAGCCAGAGTTCCAACGCCCTACTTAAAATTCAACTAGAAAGTTACCTACCAAG | | |
| | TACTAATTAGCATTATAAAGTCAGAGTCTGCAGCTCCAGGCCTTTCAGTTAGTTGTTTACTAGAAAGGACAGTCTTAAACCAGATACAGTTTACCATAAGAAAA | | |
| | GTTAAAGAATCCCAGTGAAGCAAGTTTTTTCTTTAGCCCTAGATTCCAGGCAGAACTATTGAGCATAGATAATTTTCCCCCCTCAGGCCAGCTTTTTCTTTTTTT | | |
| | TTAATTTTGTTAATAAAAGGGAGGAGATGTAGTCTCCCCTCCCCTAGCCTGAAACCTGCTTGCTCGGGGTGGAGCTTCCTGCTCATTCGTTCTGCCACGCCCAC | | |
| | TGCTGGAACCTGAGGAGCCACACACGTGCACCTTTCTACTGGACCAGAGATTATTCGGCGGGAATCGGGTCCCCTCCCCCTTCCTTCATAACTAGTGTCGCAA | | |
| | CAATAAAATTGGAGCTTTGATCAGAATGACATTGTCTTAGCTCCGTTTTTTCTTCCGCCCCGTCTAGATTCCTCTCTTACAGCTCCAGCGGCCTTCTCAGTCGAA | | |
| | CCGTTCACGTTGCGAGCTGCTGGCGGCCGCAACA | | |
| MusD9 | TGTAGTCTCCCCTCCCCCAGCCTGAAACCTGCTTGCTCGGGGTGGAGCTTCCTGCTCATTCGTTCTGCCACGCCCACTGCTGGAACCTGAGGAGCCACACACGT | 374 | 7403 |
| | GCACCTTTCTACTGGACCCGAGATTATTCGGCGGGAATCGGGTCCCCTCCCCCTTCCTTCATAACTAGTGTCGCAACAATAAAATTTGAGCTTTGATCAGTATG | | |
| | AATTTGTCTTAGCTCCGTTTCTTCTTTTGCCCCGTCTAGATTCCTCTCTTACAGCTCGAGCGGCCTTCTCAGTCGAACCGTTCACATTGCGAGCTGCTGGCGGCC | | |
| | GCAACATTTTGGCGCCAGAACTGGGACCTGAAGAATGGCAGAGAGATGCTAAGAGGAACGCTGCATTGGAGCTCCACAGGAAAGGATCTTCGTATCGGACA | | |
| | TCGGAGCAACGGACAGGTACACATGCTAGCGCTAGCTTAAAATTTCAGTTTTGTAAAGTGTTGCTGAGGATGCGGTAGGATACGAATTAAGCTTGAATCAGT | | |
| | GCTAACCCAACGCTGGTTCTGCTTGGGTCAGCAGCGTGTTAATCGGAACTAGAAACGGAAACAGGCAGGTTAGCCGCAGCTTTTTAGGAAGCTGCTTAGGTG | | |
| | GAAGAAGAAAGGGTTTAAAGTCATGGATCAGGCGGTTGCCCATAGTTTTCAGGAGTTGTTTCAGGCCAGAGGAGTAAGGCTTGAAGTACAATTAGTAAAAA | | |
| | AATTTTTAAGTAAGATAGATAGCTGTTGCCCATGGTTCAAGGAAGAAGAAACACTAGATTGTGGAACCTGGGAGAAAGTTGGTGAGGCCTTAAAAATCACTC | | |
| | AGGCAGATAATTTTACCCTAGGCCTCTGGGCGCTCGTAAATGATGCAATAAAAGATGCCACTTCCCCAGGGCTAAGTTGCCCCCAGGCGGAGCTTGTGGTAT | | |
| | CTCAGGAGGAGTGCCTGTCAGAGAGGGCCTCCTCAGAAAAAGATCTTCTTAACTCAAAAATTGATAAATGTGGAAACTCGGATGAAAAACTGATTTTTAACA | | |
| | AAAATCACTCAGATAGAGGAGCTGCCCATTACCTTAATGAGAATTGGTCCTCTTGTGAATCTCCCGCTCCACCTGTAGTCCCCACTTCGGGAGGTGCCACTCAT | | |
| | AGGGACACACGACTAAGCGAGTTAGAGTTTGAGATTAAGCTTCAGAGGCTGACTAATGAGCTTCGGGAACTAAAAAAGATGTCAGAAGCGGAGAAGAGTA | | |
| | ACTCTTCTGTAGTTCACCAGGTGCCGCTAGAAAAGGTTGTGAGTCAGGCTCGTGGGAAAGGACAGAATATGTCTAATACGCTAGCCTTTCCTGTGGTCGAGG | | |
| | TAGTTGATCAGCAAGATACTAGGGGCAGACATTACCAGACCTTAGATTTCAAGTTGATAAAAGAGTTAAAGGCGGCTGTTGTGCAATATGGCCCTTCAGCCC | | |
| | CATTCACTCAAGCATTACTGGACACAGTTGTGGAGTCACACTTAACCCCTTTAGATTGGAGGACTCTTTCTAAGGCTACCCTGTCAGGAGGAGATTTTTTGCTT | | |
| | TGGGATTCTGAATGGCGAGACGCCAGTAAGAAAACTGCTGCTTCTAACGCTCAGGCTGGTAATTCAGACTGGGATAGCAACATGCTTTTAGGAGAGGGCCCT | | |
| | TATGAGGGACAGACAAACCAGATTGATTTTCCCGTTGCAGTGTACGCGCAAATTGCGACGGCCGCACGCCGTGCTTGGGGAAGGTTGCCTGTCAAAGGAGA | | |
| | GATTGGTGGAAGTTTAGCTAGCATTCGGCAGAGTTCTGATGAACCATATCAGGATTTTGTGGACAGGCTATTGATTTCAGCTAGTAGAATCCTTGGAAATCCG | | |
| | GACACGGGAAGTCCTTTCGTTATGCAATTGGCTTATGAGAATGCTAATGCAATTTGCCGAGCTGCGATTCAACCGCATAAGGGAACGACAGATTTGGCGGGA | | |
| | TATGTCCGCCTTTGCACAGACATCGGGCCTTCCTGCGAGACCTTGCAGGGAACCCACGCGCAGGCAATGTTCTCAAGGAAACGAGGGAAAAATGTATGCTTT | | |
| | AAGTGTGGAAGTTTAGATCATTTTAGAATTGATTGTCCTCAGAACAAGGGTGCCGAGGTTAGACAAACAGGCCGTGCCCCAGGAATATGTCCCCGGTGTGGG | | |
| | AAGGGCCGCCACTGGGCAAAAGATTGTAAGCATAAAACGAGGGTTTTGAGCCGCCCGGTGCCGGGAAACGAGGAAAGGGGTCAGCCCCAGGCCCCAAGTT | | |
| | ACTCAAAGAAGACAGCTTATGGGGCTATAAATCTGCTGCCCAGCCAACAAGATCAGTTCTTGAGCTTGTCAGGTCAAACCCAGGAAATGCAAGACTGGACCT | | |
| | CTGTTCCACTGTCCATGCAGCATTAATCCCAGAAGTGGGAGTCCAAACTCTGCCTACCGGAGTCTTTGGACCACTACCTGTAGGAACCTGTGGTTTTCTCTTAG | | |
| | GACGAAGCAGTTCTATTGTAGAAGGCCTGCAGATTTATCCAGGTGTTATAAGTAATGATTATGAGGGAGAAATTAAAATCATAGCCGCTTGCCCTCGTGGTG | | |
| | CTATAACTATACCCGCTAATCAGAAAATTGCTCAACTTACTTTGATCCCTTTGCGCTGGTCACTATCTAAATTCTTTGAAAATGAAGAAGGACAGAATAACTTTG | | |
| | ACTCCCTTGGCGTAAATTGGGTGAAATCTATCACTAATCAGAGACCTAACCTTAAATTGATTCTTGATGGAAAAAGCTTTGAAGGATTAATAGATACCGGGGC | | |
| | CAATGTAACGATAATTAGAGGGCAGGACTGGCCCTCAAACTGGCCCCTGTCTGTTTCCTTGACTCACCTTCAAGGAATTGGTTATGCCAGTAACCCAAAACGT | | |
| | AGTTCCAAATTGCTAACCTGGAGAGATGAGGATGGAAAATCAGGAAATATTCAGCCGTATGTTATGCCAAATTTGCCTGTAACCCTGTGGGGAAGAGATCTG | | |
| | TTGTCACAGATGGGCGTTATCCTGTGCAGTTCTAAGGAGATGGTGACTGAACAGACGTTCAGGCAGGGACCCCTGCCTGATCGTGGACTAATAAAGAAGGG | | |
| | ACAGAAAATTAAGACTTTTGAGGATCTTAAACCCCACTCTAACGTGAGAGGTTTAAAGTATTTTCAGTAGCGGCCACTGTCTTGCCTGCATCCCACGCCGAAA | | |
| | AAATTCAATGGCGTAATGATATTCCGGTATGGGTAGATCAGTGGTCTTTACCTAAAGAGAAAATAGAGGCCGCTTCTTTGCTAGTGCAGGAGCAGTTAGAAG | | |
| | CAGGACATTTGGTGGAGTCTCACTCTCCCTGGAATACACCCATTTTCATTATCAGGAAGAAATCGGGAAAATGGAGACTGTTGCAAGATTTAAGAAAGGTTA | | |
| | ATGAAACCATGGTACTTATGGGAACTTTACAACCGGGGCTTCCCTCCCCAGTAGCCATTCCTAAGGGATATTATAAGATTGTTATAGATTTGAAAGATTGTTTC | | |
| | TTTACCATCCCTTTGCATCCAAAGGATTGTGAGAGATTTGCTTTTAGTGTTCCTTCTGTAAATTTCAAGGAACCCATGAAAAGATATCAATGGACAGTTCTCCC | | |
| | GCAGGGCATGGCTAATAGTCCCACCTTATGTCAAAGGTTTGTGGCAAAGGCAATTCAGCCTGTTAGACAACAATGGCCAAATATTTACATCATTCATTTCACA | | |
| | GATGATGTCTTGATGGCGGGAAAGGACCCCCAAGATTTGCTTTTGTGTTATGGAGACTTACAAAAGGCCCTGGCTGATAAGGGATTACAAATTGCTTCTGAA | | |
| | AAGATACAAACTCAGGATCCTTATAATTATTTGGGTTTTAGACTCACTGATCAAGCTGTTTTTCCCCAGAAAATTGTTATTCGTAGAGATAACTTAAGGACCTT | | |
| | AAATGATTTTCAAAAATTGTTAGGTGATATAAATTGGCTTCGCCCCTATCTAAAGCTTACTACAGGGGAGTTGAAACCTTTATTTGATATTCTTAAAGGGAGTT | | |
| | CTGATCCCACTTCCCCTAGATCCCTAACCTCAGAAGGATTACTGGCCTTACAGCTAGTGGAAAAGGCTATTGAAGAACAGTTTGTCAATTACATAGATTACTCC | | |
| | CTGCCGCTGCACCTGTTAATTTTTAATACGACTCATGTGCCTACGGGATTGCTATGGCAAAAATTTCCTATAATGTGGATACATTCGCGGATTTCTCCCAAACG | | |
| | TAATATCTTGCCATATCACGAAGCAGTGGCTCAGATGATTATCACTGGAAGAAGGCAGGCATTGACTTATTTTGGAAAGGAGCCAGATATCATTGTCCAGCCT | | |
| | TACAGCGTGAGTCAGGACACTTGGCTGAAACAGCATAGTACAGATTGGTTGCTTCCACAATTAGGGTTTGAAGGAACTCTAGATAGCCACTACCCCCAAGAT | | |
| | AGGTTGATAAAATTCTTAAATGTGCATGATATGATATTTCCTAAGATGACTTCCTTACAGCCTTTAAATAATGCTCTATTGATTTTTACTGATGGCTCCTCTAAA | | |
| | GGGCGAGCTGGATATCTTATTAGTAATCAACAGGTTATCATAGAGACTCCTGGTCTCTCGGCTCAGCTCGCCGAATTAACAGCAGTACTGAAGGTTTTTCAGT | | |
| | CTGTACATGAGGCTTTTAATATTTTTACTGACAGTTTATATGTTGCTCAGTCAGTACCCTTATTGGAAACCTGTGGTACGTTTAACTTCAATACGCCGTCAGGAT | | |
| | CTTTATTTTCAGAATTACAAAACATCATTCTCGCCCGGAAAAATCCGTTTTATATTGGCCACATACGGTCTCACTCTGGTCTTCCTGGACCTCTGGCAGAGGGTA | | |
| | ATGATCGCATTGACAGAGCTCTAATAGGAGAAGCCTTAGTTTCAGATCGGGTTGCTTTGGCCCAACGTGATCACGAAAGGTTTCATCTTTCTAGCCATACCCT | | |
| | AAGGCTCCGACATAAGATCACAAAGGGGCAAGCGAGAATGATCGTAAAACAATGTCCTAAATGTATTACTTTATCTCCAGTGCCGCATCTAGGAGTTAATCCT | | |
| | AGAGGCCTTATGCCTAATCATATTTGGCAAATGGATATAACCCATTATGCAGAATTTGGAAAACTAAAATATATACATGTTTGCATTGATACTTGTTCAGGATT | | |
| | TCTTTTTGCTTCTCTGCATACAGGAGAAGCTTCAAAAAACGTAATTGATCATTGCCTACAAGCATTTAATGCCATGGGATTGCCTAAACTTATTAAGACAGACA | | |
| | ATGGGCCATCTTATTCCAGTAAAAACTTTATTTCATTCTGTAAAGAATTCGGTATTAAACATAAAACTGGAATTCCTTACAACCCCATGGGACAAGGAATAGTT | | |
| | GAACGTGCTCATCACACCTTAAAGAATTGGCTTTTTAAGACAAAAGAGGGGCAGCTATATCCCCCAAGGTCACCAAAGGCCCACCTTGCCTTCACCTTATTTGT | | |
| | CCTAAATTTCTTGCACACCGATATCAAGGGCCAGTCTGCAGTGGATCGCCACTGGCATCCAGTTACTTCTAATTCTTATGCATTGGTAAAATGGAAGGACCCCC | | |
| | TGACTAATGAATGGAAGGGTCCAGATCCAGTTCTAATTTGGGGTAGGGGCTCAGTTTGTGTTTTTTCACGAGATGAAGATGGAGCGCGGTGGCTGCCAGAG | | |
| | AGATTAATTCGTCAGATGAACACAGATTCTGACTCTTCTGGTAAGTATCATTCTAAAGACTAAAATTCCTTTTGTGCTTAAAATTCAGCTGAGAGCAACAGCTC | | |
| | TCAAAGCTGTTCTCCAGCTACTCTCTGAGCCAGCTCCCGAAAGGAGGCCGGAGACTAGCCTCAGCTTTACAATTTGCATTTGAATAAAGTACCTAGACTTCCCT | | |
| | GAAAGAAGTTCTGCTTTCCTACTTTCTCACTGTCTTTCAAGATTTTGTCTTTCAAGCAGGTAAATCAACACTCTCGAAGCGGACCAGCGGATGTGCATCCCCGC | | |
| | CCCCCTAGAGCACACAGGTGGCAGCTGTTATCCCCAGACTCAGGACATTTCCAGCATGTGGCTTTCAGTCTGAGTTAAAAATTTAGGTTTACCTAGAGGGCTA | | |
| | GAAGAGTAGATTTTTCTATATTAATAAAGATTGGTTTTTATTTTGATAGACAGGCTTAGCCCCTTAGCTGACCTCTGGCTTTTCACCCTTGCTGTTACTGCAAGG | | |
| | TGTCCTTAGCTCAATAGGCTGTGGAAAAAACAGGGATGAGGAGAAACGACTTCCAGCTCCTATTTTACCCATAAATCGTGGTGTTATTAACGACATAATTCTT | | |
| | GCTTAGGCTTTGCTAATTCTGAGGTTGATAATTCTCCTTTAGGAGCTGCACAGCACTCAGAACTGTGCATACTGGTTTGTGATTGTACAAATTCAGTATGGGCA | | |
| | CCGCTTGGTGCAGAAGTACTGCAAGGGAAGGTCCGGCTTGACCGTTTCTGAGTTTCCTGTGAGATAAACCCGGTTTAAAAGAGGTTGGTATCATATTTTGGTT | | |
| | AAAAATAAAAAATATTTTCCGGCTCTACCTCGCCTCCCCAAAAGGTACCGAGAGCCACATGTGTGGGTTTTACCCACGGGAGGAATCGGGTCCATGTCCACCC | | |
| | AAGCCAAGGTTAAAAGCCCACTCATCTACGGATGAGAAAATCATTTGATCACCTCAGTTAAGCGTTGCCTTATTTAACTTAATTAATAGGGGGGAGAGAGATT | | |
| | GGAGACGTACTATTGAAAGGTCAAGCCCTTCACTGCCTCCCACCCAAATAAAAAAGCCAATTGGCCTTGTACTACAAGAGCCGGTCACTCCTTCTCCCTGTTTC | | |
| | CCACCTATCATCCAAAAATGCGGAGATCAACTAGAAAGTTACCTACCAAGTACTAATTAGCATCTTAAAGTCAGAGCCTGCAGCCCCGGGCCTTTCAGTTAGT | | |
| | TGTTTACTAGAAAGGACAGTCTTAAGCCAGATACAGTTTACCATAAGAAAGGTTAAAGAATCCTAGTGAAGCAAGTTTTTTCTTTAGCCCTAGATTCCAGGCA | | |
| | GAACTATTTGAGCATAGATAATTTTTCCCCCTCAGGCCAGCCTTTTCTTTTTTTTTTATTTTGTTAATAATAGGGAGGAGATGTAGTCTCCCCTCCCCCAGCCTGA | | |
| | AACCTGCTTGCTCGGGGTGGAGCTTCCTGCTCATTCGTTCTGCCACGCCCACTGCTGGAACCTGAGGAGCCACACACGTGCACCTTTCTACTGGACCCGAGAT | | |
| | TATTCGGCGGGAATCGGGTCCCCTCCCCCTTCCTTCATAACTAGTGTCGCAACAATAAAATTTGAGCTTTGATCAGTATGAATTTGTCTTAGCTCCGTTTCTTCT | | |
| | TTTGCCCCGTCTAGATTCCTCTCTTACAGCTCGAGCGGCCTTCTCAGTCGAACCGTTCACGTTGCGAGCTGCTGGCGGCCGCAACA | | |
| ETnII | TGTAGTCTCCCCTCCCCCAGCCTGAAACCTGCTTGCTCAGGGGTGGAGCTTCCTGCTCATTCGTTCTGCCACGCCCACTGCTGGAACCTGCGGAGCCACACCCG | 375 | 7076 |
| A1 | TGCACCTTTCTACTGGACCAGAGATTATTCGGCGGGAATCGGGTCCCCTCCCCCTTCCTTCATAACTAGTGTCGCAACAATAAAATTTGAGCCTTGATCAGAGT | | |
| | AACTGTCTTGGCTACATTTTTTCTTCCGCCCCGTCTAGATTCCTCTCTTACAGCTCGAGCGGCCTTCTCAGTCGAACCGTTCACGTTGCGAGCTGCTGGCGGCCG | | |
| | CAACATTTTGGCGCCAGAACTGGGACTTGAAGAATGGCAGAGAGATGCTAAGAGGAACGCTGCATTGGAGCTCCACAGGAAAGGATCTTCGTATCAGACAT | | |
| | CGGAGCAACGGACAGGTACACATGCTAGCGCTAGCTTAAAATTTCAGTTTTGTAAAGTGTTGCTGAGGATGCGGTAGGATACGAATTAAGCTTGAATCAGTG | | |
| | CTAACCCAACGCTGGTTCTGCTTGGGTCAGCAGCGTGTTAATCGGAACTAGAAACGGAAACAGGCAGGTTAGCCGCAGCTTTTTAGGAAGCTGCTTAGGTGG | | |
| | AAGAAGAAAGGGTTTAAAGTCATGGATCAGGCGGTAGGCCGTAGCTCTCCGAAGCTACATGAGGTGTGAGAAAAGAAAGGGTTTATTAAAAGGAATAGGC | | |
| | GTATTGCCCCAGTTAATAAAAAATGCATCATAAGGGAGGAAAATGTCCCAAAAAGCAGAGAGAAATATCTCTCTGGGCCTTATAGCAGGAGTACTCTGTTAC | | |
| | CTTTTGTGTCTTGTCTAATGTCCGGTGCACCAATCTGTTCTCGTGTTCGATTCATGTATGTTCGTGTCCAGTCTGTATGAATGAATGTTCTATGTTTTGTGTTGGA | | |
| | TAATAAAGATGGTATAAAAAACTTTATCTGCAAAGCCGAGAGCTGCCACGTGTTTCAGCCAGGAATCAGACACGTGGCGAGAGGGCCCCTGCTGGAAAAAC | | |
| | TGTTCGTTTTAGGAAATAAGGGCGAGTGCACAGCCTCTAAGTTTCAGAGTAAAAAAGCTAATAAATGGTTCATGATTAATGTGTTTGACAATGGTAAAGTGTT | | |
| | TTTTATTTTATGATTGTAGCTACAAAAATTATTATTCTCTGATTGGTCTAAATGTAACTGCTTCATTTGGTTCCTTTTTATTGGTAATGTGCTCTAAGTGTTTTCAC | | |
| | AATCAGCTCATAAGTTGTTGGTTAAGATTAATAATTGTTACATTGCTACAGATGGTTAGTGTTAAATTTGATAACTCAAGTTTAGAGTCCTTCCGACACATGGC | | |
| | ATAAGGCAGCCCAAGAGGCTGTGTCTCTAAAGATATTTCTAGTTTAGGTAATAATTAATGTGGATCGTATCCTAAATAGTAAAATTTAAAATAAGATTTAAAG | | |
| | CAATGTCTCTTTATTAAAGCATTAAAGCTTGCTTTAATAGGTATTCATACGTATTAATTGACATCCAAACTTCGTAATATGATAGTAATGCTTCTAATATTGATTT | | |
| | TAAAGATAATAAATTGTTTTAAACTTGGGTTTTGCTTTCCCAAGGTTACAGGTATTATCCTAACCTTGCACAAAAACTTAAAAATTATGGTTAAAACTGCTATTG | | |
| | TTCCATTGACTGCAGCTTGCAGTTTGATTTCAAATTTAAGATCTTTAATTCACCTGTATACTGTAATTAAGATAATTACAAGAGTAATCATCTTATGAGAGCGCT | | |
| | CATACAGCTCACTTCATACAAAACTGTGACAGAGTTATCTAGTTATGTTTGTCTTTGTGAATAGATTAGATAAACAGTTTGGTTATAGTTGCTGCCTGGCAGGA | | |
| | AACTGTAGTACAGGCAATTTTTTCACAACACTAAAGTTGTGAAGAACGTTTTAACTGTAAGTCATCTTAAGAAAGAGTATCAAAATTTAGAGGCGTAGACAGT | | |
| | TATATTGTTTCTCTAAAATCGGTCCTTATTACAGGAGGGCCAGGATGCTCAGATTAAAAAGTATTTTACGTTTGAGTCAATGCAGGGCTCTGGGCAGCCCCAG | | |
| | AGCGGCTTGTGGCCTTTCTTTTGTTTTGCAAACAGTGCCTGAAAAAAATTTTTCCCTGTGTTCAAGAGAAATTCTTTTTAACAGTGTTGCAGATCTATTCAGATG | | |
| | TTTAAAATAAGACTTAAATTCAAAGAGTTTTGCTTCTAGTGAACTGTAATCACTAGAAAATTTTGCCTCTAAGTATGGCTAATGTAACTTTACATTATGTAAGAA | | |
| | AAAATTTTATTGTTTCTGCTTCTATACAAGAAGCCAAGAGTTTTAATCTTTCAGTGTATATTGTTTCCTAAGTGAAAAGTATTTTATTAACTAATGCTTCTTGAAG | | |
| | TTTACCTTAAATCCTTGCTCTCACCCAAAAGATTCAGAGACAATATCCTTTTATTACTTAGGGTTTTAGTTTACTACAAAAGTTTCTACAAAAAATAAAGCTTTTA | | |
| | TAATTGTTATTAATTGGTAATTAAAAATTGGTTGTGCCCAAAACAATTCTTTGGCCAAAAAGAAAACATTATTGTAAAGTCATTTTTCTCATCCTCCCAGCCAAT | | |
| | CGTTGGCCCACGTGGGCCCAACTAGCTTCTGTGGGGTGGAGTCTTAAGACACAGTTTCCCCTGTTCCAGCACAGATGATCTAGTTGTGTGCTGTAGATGGTGT | | |
| | TTTAAAATACTGAACAATCAAACCTTAATTTGTATATTAATAGTCAATGCCATATCTCTGAGCTCGCAATTGCTTAAATTGTTCATCCCTCAGATACTATTAATTC | | |
| | TCAAATTTACAATTGCTTATGCATATTTCTAGTTAATAAATAAATAAATTATGCACATGTAACTCTTAATAACTTTACAAGCCTTCTAGTTACAACTGCTCCTTAA | | |
| | GAAAATTGATTGAAAGTGCAATTAGTCACTGCCCCTTTACAGCCATGTATTTAAAATGTTTTGTCAACTAGTTATTAATTCAAAAGTTTAGGTATTGTAAAATTT | | |
| | TAAAACTTTAACTTCTTAAAAGACAAAAAAGAGAGAAATTGTATCCCCGTGCATACTATTTAGTGCATTCCCATGCACACTATCTAAGTCTTACCTTTATTTTCA | | |
| | AAATTTAATATTTTAATGTCAAAGAGTTTAATAAAGGCTTTATAGTATCTTAAAGGGATCTACTTATTGGCTTATAGATTAATCCTAAAACAACTACCTTATTAG | | |
| | AAAAGGGAAAAACAGGTTTTCTCCACAGAACGCTGCAGAAGCATATTAGTAAATTCGTGTGACGAGCTGGTAGGTAAGTTGACTCATGTCCTGATTGAATTG | | |
| | ACTAAAAAACTAAATTAAATTCATGTTTTAGATCCATCCTTACTTGTCATTTTTCCAGTTTAGACTAGCTTCTAGCCTTTTAACTTTATGACAATAGTACATCAGA | | |
| | GACTGTATATTCAGACTTAGTAAAATTAGTCATTTAATAGAGTCATAATGATTTTTCTCTTTTCTTCAGTGTGACCAGCTCTTCTAACTCAATCTTAGACTGGTCT | | |
| | AATATTCAGTCCAATGTTAGAGATTCCTATATTCTAAATTACCTAGCAAGTTAATTCAGAACACATCCTCCACTTCCCCTAGATCCCTAACCTCAGAAGGATTAC | | |
| | TGGCCTTACAGCTAGTGGAAAAGGCTATTGAAGAACAGTTTGTCACTTACATAGATTACTCCCTGCCGCTGCACCTGTTAATTTTTAATACGACTCATGTGCCT | | |
| | ACGGGATTGCTATGGCAAAAATTTCCTATAATGTGGATACATTCGAGGATTTCTCCCAAACGTAATATCTTGCCATATCACGAAGCAGTGGCTCAGATGATTAT | | |
| | CACTGGAATAAGGCAGGCATTGACTTATTTTGGAAAGGAGCCAGATATCATTGTCCAGCCTTACAGCGTGAGTCAGGACACTTGGCTGAAACAGCATAGTAC | | |
| | AGATTGGTTGCTTGCACAATTAGGGTTTGAAGGAACTCTAGATAGCCACTACCCCCAAGATAGGTTGATAAAATTCTTAAATGTGCATGATATGATATTTCCTA | | |
| | AGATGACTTCCTTACAGCCTTTAAATAATGCTCTATTGATTTTTACTGATGGCTCCTCTAAAGGGCGAGCTGGATATCTTATTAGTAATCAACAGGTTATCGTA | | |
| | GAGACTCCTGGTCTCTCGGCTCAGCTCGCCGAATTAACAGCAGTACTGAAGGTTTTTCAGTCTGTGCATGAGGCTTTTAATATTTTTACTGACAGTTTATATGTT | | |
| | GCTCAGTCAGTACCCTTACTGGAAACCTGTGGTACGTTTAACTTCAATACGCCGTCAGGATCTTTATTTTCAGAATTACAAAACATTCTCGCCCGGAAAAATCC | | |
| | GTTTTATATTGGCCACATACGGTCTCACTCTGGTCTTCCTGGACCTCTGGCAGAGGGTAATGATCGCATTGACAGAGCTCTAATAGGAGAAGCCTTAGTTTCA | | |
| | GATCGGGTTGCTTTGGCCCAACGTGATCACGAAAGGTTTCATCTTTCTAGCCATACCCTAAGACTCCGACATAAGATCACAAAAGAGCAAGCGAGAATGATC | | |
| | GTAAAACAATGTCCTAAATGTATTACTTTATCTCCAGTGCCGCATCTAGGAGTTAATCCTAGAGGCCTTATGCCTAATCATATTTGGCAAATGGATATAACCCA | | |
| | TTATACAGAATTTGGAAAACTAAAATATATACATGTCTACATTGATACTTGTTCAGGATTTCTTTTTGCTTCTCTGCATACAGGAGAAGCTTCAAAAAACGTAAT | | |
| | TGATCATTGCCTACAAGCATTTAATGCCATGGGATTGCCTAAACTTATTAAGACAGACAATGGGCCATCTTATTCCAGTAAAAACTTTATTTCATTCTGTAAAG | | |
| | AATTCGGTATTAAACATAAAACTGGAATTCCTTACAACCCCATGGGACAAGGAATAGTTGAACGTGCTCATCGCACCTTAAAGAATTGGCTTTTTAAGACAAA | | |
| | AGAGGGTCAGCTATATCCCCCAAGGTCACCAAAGGCCCACCTTGCCTTCACTTTATTTGTCCTAAATTTCTTGCACACCGATATCAAGGGCCAGTCAGCAGCG | | |
| | GATCGCCACTGGCATCCAGTTACTTCTAATTCTTATGCATTGGTAAAATGGAAAGACCCCCTGACTAATGAATGGAAGGGTCCAGATCCAGTTCTAATTTGGG | | |
| | GTAGGGGCTCAGTTTGTGTTTTTTCATGAGATGAAGATGGAGCGCGGTGGCTGCCAGAGAGATTAATTCGTCAGATGAACACAGATTCTGACTCTTCTGGTA | | |
| | AGTATCATTCTAGAGACTAAAATTCCTTTTGTGCTTAAAATTCAGCTGAGAGCAACAGCTCTCAAAGGTGTTCTCCAGCTACTCTCTGAACCAGCTCCCGACAG | | |
| | GAGGCCGGAGACTAGCCTCAGCTTTACAATTTGCATTTGAATAAAGTACCTAGACTTCCCGGAAAGAAGTTCTGCTTTCCTACTTTCTCACTGTCTTTCAAGATT | | |
| | TTGTCTTTCAAGCAGGTAAATCAACATTCCCGAGGCGGACCAGTGGATGTGCATCCCTGCCCCCCTAGAGCACACAGGTGGCAGCTGTTACCCCCAGTCTCAG | | |
| | GACATTTCCAGCATGTGGCTTTCAGTCTGAGTTAAAAATTTAGGTTTACCTAGAGGGCTAGAAGAGTAGATTTTTCTATATTAATAAAGATTGGTTTTTATTTT | | |
| | GATAGACAGGCTTAGCCCCTTAGCTGACCTCTGGCTTTTCACCCTTGCTGTTACTGCAAGGTGTCCTTAGCTCAATAGGCTGTGGAAAAAACAGGGATGAGGA | | |
| | GGAACGACTTCCAGCTCCTATTTTACCCACAAATCGTGGTGTTATTAACGACATAATTCTTGCTTAGGCTTTGCTAATTCTGAGGTTGATAATTCTCCTTTAGGA | | |
| | GCTGCACAGCACTCAGAACTGTGCATACTGGTTTGTGATTGTACAAATTCAGTATGGGCACCGCTTGGTGCAGAGATACTTACTGCAAGGGAAGGTCCGGCT | | |
| | TGACCATTTCTGAGTTTCCTGTGAGATAAACCCGGTTTGAAAGAGGTTGGTACCAAATTTTGGTTAAAAATAAAAAATATTCTCCGGCTCTACCTCGCCTCCCC | | |
| | AAAAGGTACCAAGAGCCACATGTGTGGGTTTTACCCACGGGAGGAATCGGGTCCATGTCCACCCAAGCCAAGGTTAAAAGCCCACTCATCTACGGATGAGA | | |
| | AAATCATTTGATCACCTCAGTTAAGCGTTGCCTTATTTAACTTAATTAATAGGGGGGAGAGAGATTGGAGACGTACTATTGAAAGGGCAAGCCCTTCACTGCC | | |
| | TCCCACCCAAATAAAAAGGCCAATTGGCCTTGTACTACAAGAGCCGGTCACTCCTTCTCCCTGTTTCCCACCTATCTTCCAAAAATGCGGAGGAATATCAACTT | | |
| | AGTGCTATTTTCACATCGTTCAGTCAAACTTAGCCAGAGTTCCAACGCCCTACTTAAAATTCAACTAGAAAGTTACCTACCAAGTACTAATTAGCATTATAAAGT | | |
| | CAGAGTCTGCAGCTCCAGGCCTTTCAGTTAGTTGTTTACTAGAAAGGACAGTCTTAAGCCAGATACAGTTTACCATAAGAAAAGTTAAAGAATCCCAGTGAAG | | |
| | CAAGTTTTTTCTTTAACCCTAGATTCCAGGCAGAACTATTGAGCATAGATAATTTTTCCCCCCTCAGGCCAGCTTTTTCTTTTTTTATTTTGTTAATAATAGGGAG | | |
| | GAGATGTAGTCTCCCCTCCCCCAGCCTGAAACCTGCTTGCTCAGGGGTGGAGCTTCCTGCTCATTCGTTCTGCCACGCCCACTGCTGGAACCTGCGGAGCCAC | | |
| | ACCCGTGCACCTTTCTACTGGACCAGAGATTATTCGGCGGGAATCGGGTCCCCTCCCCCTTCCTTCATAACTAGTGTCGCAACAATAAAATTTGAGCCTTGATC | | |
| | AGAGTAACTGTCTTGGCTACATTTTTTCTTCCGCCCCGTCTAGATTCCTCTCTTACAGCTCGAGCGGCCTTCTCAGTCGAACCGTTCACGTTGCGAGCTGCTGGC | | |
| | GGCCGCAACA | | |
| ETnII | TTCTACAAAAGGCTATACTCAACAAAACTGGAGAACCTGGAAGAAATGGAGATGTTTCTAGACAGATACCAGGTACCAAAGTTGAATCAAGATCAGGTTAAT | 376 | 5543 |
| B1 | GATCTAAACAGTCCTATATCCCCCAAAGAAATAGAAGCAGTCATTAATAGTCTCCCAACCAAAAAAATCCCAGGACCAGATGGGTTTAGTGCAGAGTTCTATC | | |
| | AGACCTTCAAAGAAGATCTAATCCCAGTTCTTCACAAACTATTCCACAAAATAGAAACAGATGGTACTCTACCCAACAAATTCTATGAAGCCACAATTACTCTG | | |
| | ATACCTAAAACACAAAAAGACCCAACAAAGATAGAGAACTTCAGACCAATTTCCCTTATGCATATTGATGCAAAATCCTCAATAAGGTTCTTGCTCACTGAATC | | |
| | CAAGAACACATCAAAACAATCATCCCTCCTTACCAAGTAGGTTTCATCCCAGCGATGCAGGGATGGTTCAATATATGGAAATCCATCAACATAATCCAGTATAT | | |
| | AAACAAACTCAAAGACAAAAACCACATGATCATCTCGTTAGATGCTGAGAAAGCATTTGACAAAATCCAACACCCATTCATGATAAAAGTCTTGGAAAGATCA | | |
| | GGAATTCAAGGCCCATACCTAAACATGATAAAAGCAATCTACAGCAAACCAGTAGCCAACATCAAAGTAAATGGTGAGAAACTTGAAGCAATACCACTAAAA | | |
| | TCAGGGACTAGACAAGGCTGTCCACTCTCTCCCTACCTACTCAACATTGTACTTGAAGTCCTAGCCAGAGCAATTAAACAACAAAAGGAGATCAAGAGGATAC | | |
| | AAATTGGAAAGGAAGAAGTCAAAAATATCACTCTTTGCAGATGATATGATAGTATATATAAGTGACCCTAAAAATTCCACCAGAGAACTCCTAAGCCTGATAA | | |
| | ACAGCTTCGGTGAAGTAGCTGGATATAAAATTAACTCAAACAAGTCAATGGCCTTTCTGTACACAAAGGATAAATAGGCTGAGAAAGAAATTAGGGAAACAA | | |
| | CACCCTTCTCAATAGTCACAAATAATATAAAATACCTTGGCGTGAGTCTAACTAAGAAAGTGAAAGATCTGTATGATAAGAACTTCATGTCTCTGAAGAAAGA | | |
| | AATTAGAGAAGATCTCAGAAGATGGAAAGATCTCCCATGCTCATGGATTGGCAGGATCAATATAGTAAAAATGGCTATCTTGCTAAAACCATCTAAAGATTCA | | |
| | ACGCAATCTCCATGAAAATTCCAACTCAATTCTTCAACAAATTAGAAAGGGCAATCGGCAGATTCATCTGGAATAACAAAAAACCTAGGATAGCAAAAACTCT | | |
| | TCTCAAGGATAAAAGAACCTCTGGTGGAATCACCATGCCCGACCTAAAGCTGTACTACAGAGCAATTGTGATTAAAAACTGCATGGTACTGGTATAGTGACA | | |
| | GACAAGTAGACAAATGGAACAGAATTGAAGACCCAGAGATGAACCCACACGTCTATGGTCACTTGATCTTTGACAAGGGAGCTAAAACCATCCAGTGGAAA | | |
| | AAAGACAGCATTTTCAACAAATGGTGTTGGCACAACTGGCTGTTATCATGTAGAAGATTGTGAATTGATCCATTCATATCTCCTTGTACTAAGATCAAATCTAA | | |
| | GTGGATCAACATAAAACCAGAGACAGTGAAACTTATAGAGGAGAAAGTAGGGAAAAGCCTCGAAGATTTGGGTACAAGAGAAAAATTCCTGAATAGAACA | | |
| | GCAATGGCTTGTGCTATAAGATCGAGAAACGATAAATGAGACCTCATAAAATTGCAAAGCTTCTGCAAGGCAAAAGACACCGTCAATAAGACAAAAGACCAC | | |
| | CAACAAATTGGGAAAGGATCTTTACCTATCCCAAATTGGATAGGGTACTAACATCCAATATATATAAAGAACTCAAGAAGGTGGACTCCAGAAAATCAAATA | | |
| | ACCCCATTAAAAAATGGGGCTCAGAACTGAACAAAGAATTCTCACCTGTGGAATACCGAATGGCAGAGAAGCACCTGAAAAAATGTTCAACATACTTAACCA | | |
| | TCAGGAAAATGCAAATCAAAACAACCCTGAGATTCTACCTCACACCAGTCAGAATGGCTAAGATCAAAAATTCAGGTGAGAGCAGATGCTGGTGAGGATGT | | |
| | GGAGAAAGAGGAACACTCCTCCATTTTTGGTGGGATTGCAAGCTTGTACAACCACTCTGGAAATCAGTCTGGTGGTTCCTCAGAAAATTGGACATAGTACTAC | | |
| | CGGAGGATCCAGCAATACCTCTCCTGGGCATATATCCAGAAGATGTCCCAACCGGTAAGAAGGACACTATGTTCATAGCAGTGTTATTTTTAATAGCCAGAAG | | |
| | CTGGGAAGAACCCAGATGCTCCTCAACAGGGGTGGATACAGAAAATGTGGTACATTTACACAATGGAGTACTACTCAGCTATTAAAAAGAATGAATTTATGA | | |
| | AATTCCTAGGCACATGGATGGACCTGGAGGGCATCATCCTGAGTGAGGTAACCCAATCACAAAGGAACTCACACAATATATACTCACTGATAAGTGGATATT | | |
| | AGCCCAGAATCTTAGGATACCCAAGATATAAGATACAATTTGCTAAACGCATGAAACTCAAGAAGAATGAAGACGAGGGTGTGGGGAGTTTGCCCCTTCTTA | | |
| | GAATTGGGAACAAAAGGGGCGTGGGGGGAGTTACAGAGACAAAATTTTGAGCTGTGATGAAAGGCAATCTAGTGATTGCCATATCCAGGGATCCATCCCAT | | |
| | AATCAGCTTCCAAATGTTGACACCATTGCATACTCTAGCCAGATTTTGCTGAAAGGACTCAGATATAGCTGTTTCTTGTGAGACAATGCCGGGGCCTAGCAAA | | |
| | CACAGAAGTGGATGCTCCCAGTCAGCTATTGGATGGATCACAGGGCCCCCAATGCAGGAGCTAGAGAAAGTACCCAAGGATCTAAAGGGATTTGCAACCCT | | |
| | ATAGGTGGAACAACATTATGAACTAACCAATACCCCGGAGCTCTTGTCTCTAGCTTCATATGTATCAAAGGATGGCCTAGTTGGCCATCATTGGAAAGAGAGG | | |
| | CCCATTGGACTTGCAAACTTTATATGCCTCAGTACAGGTGTAAGCCAGGGCGAAAAAGGGGGAGTGGGTGGGTAGGGGAGTAGGGGGGTGGGTATGGGG | | |
| | GACTTTTGGGATAGCATCGGAAATGTAAATGAGGAAAATACCTAATTAAAAAAAAAGAGTTTGAACTAGAAGGAATAAGTTTTGCCTAGCATCAGGGAGGT | | |
| | CTATATGTGGTTTGGGTGCCCAGAAAGACTGAGTAGTTATAATGCCAGAGGTTTCAAAAATAGGCCAAAGAGAGGCAGATTAGTAATCTCTGTACTGTAATT | | |
| | GCTGTGGTGGTAACACCTGCATGACCAAATAAATCTCTGGGGTTTTTGGTCCTTCGAATGGTGAAAATCATACATATTTCCACATCTTGGAGTCAAAACTTTTG | | |
| | TTGTGTGATACTGATATTCATTCCTGAGCCATTTTCCTAAGCTTATTGGTTGTGTGTGATATAATATTGTCTAGATGTCTAGACAGTGCTTGCCTTGGTACAGTA | | |
| | CTTGGTGAGAACTCACTGTCCCACCTGCTTGGCTAACCCCCAGTTTTAGTGATTTTTTTTTTTTTACTAAGCTTCAACATTTACAATAAACACATCTTAAAAAGTG | | |
| | TCGAAAGAAGTAGTATATTAGAAATTGGAGTGCATTGGATAGATGAAAGGTTAAGGTCTTTGAAATGAGGTAGGAAGATTTTAGAACACAAAGGACCATGT | | |
| | TAACCAGAGGGACATTGTGTGCTCTTGCTCCTTTCCTTCTGATCATAAGTCAAGATGGTTTGGAGCAGATATTTTGGGATTAATACCCATTCATTCACTCATTTC | | |
| | TTGAGTTCTTTCTATAATTTGTCTTCTGACACATTGTCCTCAGCAATTCCAAAGTTTAGGTTAACCCTAAAAACTTTTTCCTTCAAAGTCAATTTTGTGAGGAGTG | | |
| | GTAGAACATGATATTGGCAATTTATGCACAGACTTTTACGTGTTTAGGTACTGTCTTGAACTCTTTTCATGTTTCTTTGGTCTGCCTTCTCCAGTTTTGTGGATGT | | |
| | TTATAATTGTAGTCTCCCCTCCCCCAGCCTGAAACCTGCTTGCTCGGGGTGGAGCTTCCTGCTCATTCGTTCTGCCACGCCCACTGCTGGAACCTGAGGAGCCA | | |
| | CACACGTGCACCTTTCTACTGGACCAGAGATTATTCGGCGGGAATCGGGTCCCCTCCCCCTTCCTTCATAACTGGTGTCACAACAATAAAATTTGAGCCTTGAT | | |
| | CAGAGTAACTGTCTTGGCTACATTTCTTCTTTTGCCCCGTCTAGATTCCTCTCTTACAGCTCGAGCGGCCTTCTCAGTCGAACCGTTCACGTTGCGAGCTGCTGG | | |
| | CGGCCGCAACATTTTGGCGCCCGAACAGGGACCTGAAGAATGGCAGAGAGATGCTAAGAGGAACGCTGCATTGGAGCTCCACAGGAAAGGATCTTCGTATC | | |
| | GGACATCGGAGCAACGGACAAGTACACATGCTAGCGCTAGCTTAAAATTTCAGTTTTGTAAAGTGTTGCTGAGGATGCGGTAGGATACGAATTAAGCTTGAA | | |
| | TCAGTGCTAACCCAACGCTGGTTCTGCTTGGGTCAGCAGCGTGTTAATCGGAACTAGAAACGGAAACAGGCAGGTTAGCCGCAGCTTTTTAGGAAGCTGCTT | | |
| | AGGTGGAAGAAGAAAGGGTTTAAAGTCATGGATCAGGCGGTAGGCCGTAGCTCTCCGAAGCTACATGAGGTGTGAGAAAAGAAAGGGTTTATTAAAAGGA | | |
| | ATAGGCGTATTGCCCCAGTTAATAAAAAATGCATCATAAGGGAGGAAAATGTCCCAAAAAGCAGAGAGAAATATCTCTCTGGGCCTTATAGCAGGAGTACTC | | |
| | TGTTACCTTTTGTGTCTTGTCTAATGTCCGGTGCACCAATCTGTTCTCGTGTTCGATTCATGTATGTTCGTGTCCAGTCTGTATGAATGAATGTTCTATGTTTTGT | | |
| | GTTGGATAATAAAGATGGTATAAAAAACTTTATCTGCAAAGCCGAGAGCTGCCACGTGTTTCAGCCAGGAATCAGACACGTGGCGAGAGGGCCCCTGCTGG | | |
| | AAAAACTGTTCGTTTTAGGAAATAAGGGCGAGTGCACAGCCTCTAAGTTTCAGAGTAAAAAAGCTAATAAATGGTTCATGATTAATGTGTTTGACAATGGTAA | | |
| | AGTGTTTTTTATTTTATGATTGTAGCTACAAAAATTATTATTCTCTGATTGGTCTAAATGTAACTGCTTCATTTGGTTCTTTTTTATTGGTAATGTGCTCTAAGTGT | | |
| | TTTCACAATCAGCTCATAAGTTGTTGGTTAAGATTAATAATTGTTACATTGCTACAGATGGTTAGTGTTAAATTTGATAACTCAAGTTTAGAGTCCTTCCGACAC | | |
| | ATGGCATAAGGCAGCCCAAGAGGCTGGGTCTCTAAAGATATTTCTAGTTTAGGTAATAATTAATATGGTTCGTATCCTAAATAGTAAAATTTA | | |
| ETnII | TCTTAGGTTTCCCCAAAGACAGAACCATCACCCCAAATCAGCAGTGAATTGTTTATAAACACAATGACCTTATTTCTGCCCCACCATCACTCCTTTCTAGTTTCTT | 377 | 5536 |
| B2 | ATATTTAATTAAACCAAAATCGATGAATATTGGTTTACAGACAATTCCACTAGGCTTCTCTCAGGAAACTAGCTAGCAACAGGAACCTAGCCATAGCTTACATC | | |
| | ATTACCTGCCACGAGGTGCTAGCCAGGTATGTAAGAGAATTGCTAGTACCCAGCTCTCACTCCATCTCCTATTCACTCTGCCCCCTACTTCAGTCTCTTTCTCTTC | | |
| | AGACACCACAAAGTCACCCCATGCAACAGATCTCATGGGAGAGGTTTATTGGGGGAGGAATATGTAGAGGCTACCTCTGGGTGAGGTTATTAGGGGAACGA | | |
| | GGATAGGGAGAGGAGACACTGCCTTTTTATGCAGGATATAATGCATACAGGTAGAAAGGATGCATGACTCGTGGCAACAGTAAAATTGTGTCACATCTTGAT | | |
| | GGCTGGTGATGACCTGTCCTGCTCTTGCAAGATTGCTGGAATTGGGGTTAGCAATGTTCTTAGCATTTCTTTTTCTTTTCTTTTCTTTTATTTTATTTTCTTTTCTT | | |
| | TTCTTTTTTCTTTTTTTGTTTCTTTGGGGTTTTTTTTGTTTTTTTTTTTGTTTGTTTGTTTGTTTTGTTTTTTGGGGGTTTTTTGTTTGTTTGTTTTTCAAGACAGTGTT | | |
| | TCTCTGTAGCCCTGGCTGGAACTCACTTTGTAGACCAGGCTAGCCTCGAAAGAATCCACCTGCCTCTGCTTCCCAAGTGCTGGAATTAAAGGCATACGCCACC | | |
| | ATGCCCGGCAGCATTTCTTTTAGGCTCCACTCAACAATTACCTGGCAATAGCCAGGTGGGCTTGGCTTGCTGTAAAAGAGGCTGTTTGGGCTCTCCTTGTTCTC | | |
| | TCTGCCCCCTTTTCTATCTTTGACTCTCTCTTTCTCTCTCTCTCTCTCTCTCTCTCTCTCTCTCTCTCTCTCTCTCTCTCTCTCTCACACACACACACTTTTTCCATCTCT | | |
| | TCCCTTCCCTTTCCACATGTCCCTGGCTTGCCTCTCTTCTCTTGCCCTCTTCTCCCTTCTCCTGTCCTCTCCTCACCTGTCTTCTTCTCTCTCTCTCTCTCTCTCTCTGT | | |
| | CTCTCTCTCAGTTTCAGTTTCTCTCTGCTTCTCTCTCTCTCTCTCTCTCTCTCTCTCTCTCTCTCTCTCTCACTCTCTCTCTCTGTCTTTCTCTGTCTCTACTCCTTTCTC | | |
| | CTTTCTTATCCCCCTTCCCATGCCCCCAAATAAACTGTACCTCAGAGGAAAGGGATACCTCAGCATGGGCCCACTGAGGCAACCCTTCCACCACACCATACCAC | | |
| | CCTGTATAAAACATATACTTGGTTTTTATAAAACACAACAGGTGAAGTTTTCCAACAGTTTCTTTTTAAAAGTGTTTTTATTACATTTACTTCACGTATGCACACT | | |
| | TGTGTTTGTATGTGTGTGTCTGTCTATCTGTCTGTGTGTGTGTCTGTGTGGCATGCCTATGGAGAGACCAATAAACTGAAGTTAGTTTTTTCCTTCTATTACTTG | | |
| | TTTCCCAGGTCTAAACATGAAAACATATTGTCAATCTTGGCAGCAAGTGCCTTTACCTATTGAGCCATCTCTCCAGTTCTTGTAAGGATTTTCTTGGTCTCTAAA | | |
| | TCAACATTCTTACACCTACTCCATTCAATATAATGTGGCATTTGTTTAACTTTCCCCCAGACCATGAAGTGATAAAGCTTGACTGAGCTCAACAAGGAAGATCA | | |
| | AAGGGAAGTGACATTTAAGTATCAGACTTGAGAAGCAAGCTTGAAAGCCTCTGAGTTCTGCTTGGTTATATTCATCACGTAGTCGTGAAAACCTACATATTCC | | |
| | ATTGGGTTAAAGAGCAGAAAATATGATACAGAAGATATGAGTCTTAAGTCTTGAACATTTAGATAAATAGATCTTATGAGAAATTCCTTCCACATCTCAAGAA | | |
| | CAAATACAGATGCAGAAATAAGAACTTTGTGCCTGTGAATAGAGGGTAGGAATGAAGAAACTGGAAAACCCTTAAATAATATTTTAGTTATGGTATGGTGTG | | |
| | GTGGAAGGGGTGCCTCAGTGGGTCCATGCTGAGGTATCCCTTTCCTCTGAGGTACAGTTTATTTGGGGGCATGGGAAGGGGGATAAGAAAGGAGAAAGGA | | |
| | GTAAAGACAGAGAAAGACAAAGAGAGTGAGCGAGAGAGAGAGAGAGAGAGAGCAAGAGAGAGAGAGGGAGAGAGAGAGAGAGAGAGAGAGAGAGAG | | |
| | AGAGAGAGAGAGAGAGAAGAAATAACAGAGGAAAGATATTTGAAAGTTGGGTTTAGAGTGTCTTAAATGTTGGTAATTAGTGATCAATTGGTATATAACAA | | |
| | GGAACATCAAACTCAGTGATTTAACTCTGCTCACTTCTTTTGTAGGTCAGAAATCCACCCATGGCTTAGCTGGGTACTCTGTGTAGTGGTACCCTAGCACAATT | | |
| | CAGGTTTTAGCTGAGGCTGTTATTTTATCATTGTGATAGGTGCCTCTCCCAACCTCATTCAAGGTGTTGGTAGGATTTATCACCTTGTGGTAGCATAATTGGAA | | |
| | TCCTATTTTCTTGCCAACTCTCTGAGGAAGGGGTGGTTAACATTTGGAAGGATTTCATTTACATATTTTCTGAAAGCACTGGAATTTGTTATTTCTTGGCACTCT | | |
| | GCAGGAGAGGGTTTAACACAAACGTTTTTGTTTTTATTTCTGTTTCTGTTTTACTGGCTTTATCAAATGATGCAAATCCACCAGAATAATAAAAATTAACATTGA | | |
| | TAAAGTAAAAAATCAATTAATATATGCATACAATAACAATTGGTGTGTTAATACCAAAGTTTGGAAGAGAAAAACCACCTACCAAAATCATCACAGCCAAATT | | |
| | AATTAAAGCAAGCAATACATGACAGTAAGCTTTTTTCTTCCTGTACATGGGCTGTCTCCAGCTCAAATAGGGATTGAGAGGTCAAAATTAGATGTAAGGAAGA | | |
| | CAATGTTTTTTATAGTTAAGGGTTAAGTGGTTTTCTAATGGGGGAATTTGGCAGACAAAGTAGGTCAGTTTACAAGAACAGAGCATAAGCATAACGAGTTAG | | |
| | AAAGGTGACCCCCCCAAAACAAAGGCATGATTACAAGGTGGTCTTAACAACAGGAAGCCATAACAAGGGAGTCCAACTAACTCCAGAGATTACCAGATGGC | | |
| | TAAAGGCAAATGGAAGAATCTTACTAACAGAAACCACTCATCACCATAAGAACCCAGCACTCCGAACTCAGCCAGTCCTGGATACCCCAAAACGCCTGAAAA | | |
| | GCTAGACCCGGAGTTAAAATCATATCTCATGATGATGGTAGAGGACATCAAGAAGGACTTTAATAACTCACTTAAAGAAATACAGGAGAACACTGCTAAAGA | | |
| | GGTACAAGACCATAAAGAAAAGCAGGAAAACACAACCAAACAGATGATGGAACTGAACAAAACCATAGAAGACGTAAAAAGGGAAGTAGACACTGTAGTC | | |
| | TCCCCTCCCCCAGCCTGAAACCTGCTTGCTCAGGGGTGGAGCTTCCTGCTCATTCGTTCTGCCACGCCCACTGCTGGAACCTGAGGAGCCACACACGTGCACC | | |
| | TTTCTACTGGACCAGAGATTATTCGGCGGGAATCGGGTCCCCTCCCCCTTCCTTCATAACTGGTGTCGCAACAATAAAATTTGAGCCTTGATCAGAGTAACTGT | | |
| | CTTGGCTACATTTCTTCTTTTGCCCCGTCTAGATTCCTCTCTTACAGCTCGAGCGGCCTTCTCAGTCGAACCGTTCACGTTGCGAGCTGCTGGCGGCCGCAACAT | | |
| | TTTGGCGCCAGAACTGGGACCTGAAGAATGGCAGAGAGATGCTAAGAGGAACGCTGCATTGGAGCTCCACAGGAAAGGATCTTCGTATCGGACATCGGAG | | |
| | CAACGGACAAGTACACATGCTAGCGCTAGCTTAAAATTTCAGTTTTGTAAAGTGTTGCTGAGGATGCGGTAGGATACGAATTAAGCTTGAATCAGTGCTAACC | | |
| | CAACGCTGGTTCTGCTTGGGTCAGCAGCGTGTTAATCGGAACTAGAAACGGAAACAGGCAGGTTAGCCGCAGCTTTTTAGGAAGCTGCTTAGGTGAAAGAA | | |
| | GAAAGGGTTTAAAGTCATGGATCAGGCGGTAGGCCGTAGCTCTCCGAAGCTACATGAGGTGTGAGAAAAGAAAGGGTTTATTAAAAGGAATAGGCGGATT | | |
| | GCCCCAGTTAATAAAAAATACATCATAAGGGAGGAAAATGTCCCAAAAAGCAGAGAGAAATATCTCTCTGGGCCTTATAGCAGGAGTACTCTGTTCCCCTTTG | | |
| | TGTCTTGTCTAATGTCCGGTGCACCAATCTGTTCTCGTGTTCGATTCATGTATGTTCGTGTCCAGTCTGTATGAATGAATGTTCTATGTTTTGTGTTGGATAATA | | |
| | AAGATGGTATAAAAAACTTTATCTGCAAAGCCGAGAGCTGCCACATGTTTCAGCCAGGAATCAGACACGTGGCAAGAGGGCCCCTGCTGGAAAAACTGTTCG | | |
| | TTTTAGAAAATAAGGGCGAGTGCACAGCCTCTAAGTTTCAGAGTAAAAAAGCTAATAAATGGTTCATGATTAATGTGTTTGACAATGGTAAAGTGTTTTTTAT | | |
| | TTTATGATTGTAGCTACAAAAATTATTATTCTCTGATTGGTCTAAATGTAACTGCTTCATTTGGTTCCTTTTTATTGGTAATGTGCTCTAAGTGTTTTCACAATCA | | |
| | GCTCATAAGTTGTTGGTTAAGATTAATAATTGTTACATTGCTACAGATGGTTAGTGTTAAATTTGATAACTCAAGTTTAGAGTCCTTCCGACACATGGCATAAG | | |
| | GCAGCCCAAGAGGCTGGGTCTCTAAAGATATTTCTAGTTTAGGTAATAATTAATATGGTTCGTATCCTAAATAGTAAAATTTAAAATAAGATTTAAAGCAATGT | | |
| | CTCTTTATTAAAGCATTAAAGCTTGCTTTAATAGGTATTCATAGGTATTAATTGACATCCAAACTTCGTAATACGATAGTAATGCTTCTAATATTGATTTTAAAG | | |
| | ATAATAAATTGTTTTAAACTTGGGTTTTACTTTCCCAAGGTTATAGGTATTATCCTAACCTTGCACAAAAAACTTAAAAATTATGGTTAAAACTGCTATTGTTTC | | |
| | ATTGACTGCAGCTTGCAGTTTGATTTCAAATTTAAGATCTTTAATTCACCTGTATACTGTAATTAAGATAATTACAAGAGTAATCATCTTATGAGAGTGCTCATA | | |
| | CAGCTCACTTCATACAAAACTGTGACAGAGTTATCTAGTTATGTTTGTCTTTGTAAATAGATTAGACAGTTTGGTTATAGTTGCTGCCTGGCAGGAAACTGCAG | | |
| | TACAGGCAATTTTTTCACAACACTAAAGTTGTGAAGAACGTTTTAACTGTAAGTCATCTTAAGAAAGAGTATCAAAATTTGGAGGCGTAGACAGTTATATTGTT | | |
| | TCTCTAGAATCGGTCCTTATTACAGGAGGGCCAAG | | |
| ETnII | TGTAGTCTCCCCTCCCCTAGCCTGAAACCTGCTTGCTCGGGGTGGAGCTTCCTGCTCATTCGTTCTGCCACGCCCACTGCTGGAACCTGAGGAGCCACACACGT | 378 | 5538 |
| B3 | GCACCTTTCTACTGGACCAGAGATTATTCGGCGGGAATCGGGTCCCCTCCCCCTTCCTTCATAACTGGTGTCGCAACAATAAAATTTGAGCCTTGATCAGAGTA | | |
| | ACTGTCTTGGCTACATTTCTTCTTTTGCCCCGTCTAGATTCCTCTCTTACAGCTCGAGCGGCCTTCTCAGTCGAACCGTTCACGTTGCGAGCTGCTGGCGGCCGC | | |
| | AACATTTTGGCGCCCGAACAGGGACCTGAAGAATGGCAGAGAGATGCTAAGAGGAACGCTGCATTGGAGCTCCACAGGAAAGGATCTTCGTATCGGACATC | | |
| | GGAGCAACGGACAAGTACACATGCTAGCGCTAGCTTAAAATTTCAGTTTTGTAAAGTGTTGCTGAGGATGCGGTAGGATACGAATTAAGCTTGAATCAGTGC | | |
| | TAACCCAACGCTGGTTCTGCTTGGGTCAGCAGCGTGTTAATCGGAACTAGAAACGGAAACAGGCAGGTTAGCCGCAGCTTTTTAGGAAGCTGCTTAGGTGAA | | |
| | AGAAGAAAGGGTTTAAAGTCATGGATCAGGCGGTAGGCCGTAGCTCTCCGAAGCTACATGAGGTGTGAGAAAAGAAAGGGTTTATTAAAAGGAATAGGCG | | |
| | GATTGCCCCAGTTAATAAAAAATACATCATAAGGGAGGAAAATGTCCCAAAAAGCAGAGAGAAATATCTCTCTGGGCCTTATAGCAGGAGTACTCTGTTCCC | | |
| | CTTTGTGTCTTGTCTAATGTCCGGTGCACCAATCTGTTCTCGTGTTCGATTCATGTATGTTCGTGTCCAGTCTGTATGAATGAATGTTCTATGTTTTGTGTTGGAT | | |
| | AATAAAGATGGTATAAAAAACTTTATCTGCAAAGCCGAGAGCTGCCACGTGTTTCAGCCAGGAATCAGACACGTGGCGAGAGGGCCCCTGCTGGAAAAACT | | |
| | GTTCGTTTTAGAAAATAAGGGCGAGTGCACAGCCTCTAAGTTTCAGAGTAAAAAAGCTAATAAATGGTTCATGATTAATGTGTTTGACAATGGTAAAGTGTTT | | |
| | TTTATTTTATGATTGTAGCTACAAAAATTATTATTCTCTGATTGGTCTAAATGTAACTGCTTCATTTGGTTCTTTTTTATTGGTAATGTGCTCTAAGTGTTTTCACA | | |
| | ATCAGCTCATAAGTTGTTGGTTAAGATTAATAATTGTTACATTGCTACAGATGGTTAGTGTTAAATTTGATAACTCAAGTTTAGAGTCCTTCCAACACATGGCA | | |
| | TAAGGCAGCCCAAGAGGCTGGGTCTCTAAAGATATTTCTAGTTTAGGTAATAATTAATATGGTTCGTATCCTAAATAGTAAAATTTAAAATAAGATTTAAAGC | | |
| | AATGTCTCTTTATTAAAGCATTAAAGCTTGCTTTAATAGGTATTCATAGGTATTAATTGACATCCAAACTTCGTAATACGATAGTAATGCTTCTAATATTGATTTT | | |
| | AAAGATAATAAATTGTTTTAAACTTGGGTTTTGCTTTCCCAAGGTTATAGGTATTATCCTAACCTTGCACAAAAAACTTAAAAATTATGGTTAAAACTGCTATTG | | |
| | TTCCATTGACTGCAGCTTGCAGTTTGATTTCAAATTTAAGATCTTTAATTCACCTGTATACTGTAATTAAGATAATTACAAGAGTAATCATCTTATGAGAGCGCT | | |
| | CATACAGCTCACTTCATACAAAACTGTGACAGAGTTATCTAGTTATGTTTGTCTTTGTGAATAGATTAGACAAACAGTTTGGTTATAGTTGCTGCCTGGCAGGA | | |
| | AACTGTAGTACAGGCAATTTTTTCACAACACTAAAGTTGTGAAGAACGTTTTAACTGTAAGTCATCTTAAGAAAGAGTATCAAAATTTAGAGGCGTAGACAGT | | |
| | TATATTGTTTCTCTAAAATCGGTCCTTATTACAGGAGGGCCAGGATGCTCAGATTAAAAAGTATTTTACGTTTGAGTCAATGCAGGGCTCTGGGCAGCCCCAG | | |
| | AGCGGCTTGTGGCCTTTCTTTTGTTTTGCAAACAGTGCCTGAGAAAGATTTTTCCCTGTGTTCAAGAAAAATTCTTTTTAACAGTGTTGCAGATCTATTCAGATG | | |
| | TTTAAAATAATGCTTAAATTCAAAGAGTTTTGCTTCTAGTGAACTGTAATCACTAGAAAATTTTGCCTCTAGGTATGGCTAATGTAACTTTACATTATGTAAGAA | | |
| | AAATTTTATTGTTTCTGCTTCTATACAAGAAGCCAAGAGTTTTAATCTTTCAGTGTATATTGTTTCCTAAGTGAAAAGTATTTTATTAACTAATGCTTCTTAAAGT | | |
| | TTACCTTAAATCCTTGCTCTCACCCAAAAGATTCAGAGACAATATCCTTTTATTACTTAGGGTTTTAGTTTACTACAAAAGTTTCTACAAAAAATAAAGCTTTTAT | | |
| | AATTGTTATTAATTGGTAATTAAAAATTGGTTGTGCCCAAAACAATTCTTTGGCCAAAAAAAAAAACATTATTGTAAAGTCATTTTTCTCATCCTCCCAGCCAAT | | |
| | CGTTGGCCCACGTGGGCCCAACTAGCTTCTGTGGGGCAGAGTCTTAAGACACAGTTTCCCCTGTTCCAGCACAGATGATCTAGTTGTGTGCTGTAGATGGTGT | | |
| | TTTAAAATGCTGAACAATCAAACCTTAATTTGTATATTAATAGTCAATGCCATATCTCTGAGCTCACAATTGCTTAAATTGTTCATCCCTCAGATACTATTAATTC | | |
| | TCAAATTTACAATTGCTTATGCATATTTCTAGTTAATAAATAAATTATGCACATGTGACTCTTAATAACTTTACAAGCCTTCTAGTTACAACTGCTCCTTAAGAAA | | |
| | ATTGATTAAAAGTGCAATTAGTCACTGCCCCTTTACAGCCAAGTATTTAAAATGTTTTGTCAACTAGTTATTAATTCAAAAGTTTAGGTATTGTAAAATTTTAAA | | |
| | ACTTTAACTTCTTAAAAGACAAAAAAGAGAGAAATTGTATCCCCGTGCATGCTATTTAGTGCATTCCCATGCACACTATTAAAGTCTTACCTTTATTTTCAAAAT | | |
| | CTAATATTTTAATGTCAAAGAGTTTAATAAATGCTTTATAGTATCTTAAAGGGATCTACTTATTGGCTTATAGATTAATCCTAAAACAGCTACCTTATTAAAAAA | | |
| | GGGAAAAACAGGTTTTCTCCACAGAACGCTGCAGAAGCATATTAATAAATTCGTGTGACGAGCTGGTAGGTAAGTTGACTCATGTCCTGATTAAATTGACTAA | | |
| | AAAACTAAATTAAATTCATGTTTTAGATCCATCCTTACTTGTCATTTTTCCAGTTTAGACTAGCTTCTAGCCTTTTAACTTTATGACAATAGTACATCAGAGACTG | | |
| | TATATTCAGACTTAGTAAAATTAGTCATTTAATAGAGTCATAATGATTTTTCTCCTTTCTTCAGTGTGACCAGCCATTCTAACTCAATCTTAGACTGGTCCTAATA | | |
| | TTCAGTCCAATGTTAGAGATTCCTATATTCTAAATTACCTAGCAAGTTAATTAAAGAGCAATTGGTCACTTAATACCCCCTGACTAACAAATGGAAGGGTCCAG | | |
| | ATCCAGTTCTAATTTGGGGTAGGGACTCAGTTTGTGTTTTTTCACGAGATGAAGATGGAGCGCGGTGGCTGCCAGAGAGATTAATTCGTCAGATGAACACAG | | |
| | ATTCTGACTCTTCTGGTAAGTATCATTCTAAAGACTAAAATTCCTTTTGTGCTTAAAATTCAGCTGAGAGCAACAGCTCTCAAAGGTGTTCTCCAGCTACTCTCT | | |
| | GAACCAGCTCCCGACAGGAGGCCGGAGACTAGCCTCAGCTTTACAATTTGCATTTGAATAAAGTACCTAGACTTCCCGGAAAGAAGTTCTGCTTTCCTACTTT | | |
| | CTCACTGTCTTTCAAGATTTTGTCTTTCAAGCAGGTAAATCAACATTCCCGAGGCGGACCAGTAGATGTGCATCCCCGCCCCCCTAGAGCACACAGGTGGCAG | | |
| | CTGTTACCCCCAGTCTCAGGACATTTCCAGCATGTGGCTTTCAGTCTGAGTTAAAAATTTAGGTTTACCTAGAGGGCTAGAAGAGTAGATTTTTCTATATTAAT | | |
| | AAAGATTGGTTTTTATTTTGATAGACAGGCTTAGCCCCTTAGCTGACCTCTGGCTTTTCACCCTTGCTGTTACTGCAAGGTGTCCTTAGCTCAATAGGCTGTGG | | |
| | AAAAAACAGGGATGAGGAGGAACGACTTCCAGCTCCTATTTTACCCACAAATCGTGGTGTTATTAACGACATAATTCTTGCTTAGGCTTTGCTAATTCTGAGG | | |
| | TTGATAATTCTCCTTTAGGAGCTGCACAGCACTCAGAACTGTGCATACTGGTTTGTGATTGTACAAATTCAGTATGGGCACCGCTTGGTGCAGAGATACTTACT | | |
| | GCAAGGGAAGGTCCGGCTTGACCATTTCTGAGTTTCCTGTGAGATAAACCCGGTTTGAAAGAGGTTGGTACCAAATTTTGGTTAAAAATAAAAAATATTCTCC | | |
| | GGCTCTACCTCGCCTCCCCAAAAGGTACCAAGAGCCACATGTGTGGGTTTTACCCACGGGAGGAATCGGGTCCATGTCCACCCAAGCCAAGGTTAAAAGCCC | | |
| | ACTCATCTACGGATGAGAAAATCATTTGATCACCTCAGTTAAGCGTTGCCTTATTTAACTTAATTAATAGGGGGGAGAGAGATTGGAGACGTACTATTGAAAG | | |
| | GGCAAGCCCTTCACTGCCTCCCACCCAAATAAAAAGGCCAATTGGCCTTGTACTACAAGAGCCGGTCACTCCTTCTCCCTGTTTCCCACCTATCTTCCAAAAATG | | |
| | CTAAGGAATTCAACTTAGTGTTATTTTCACATCGTTCAGTCAAACTTAGCCAGAGTTCCAAACGCCCTACTTAAAATTCAACTAGAAAGTTACCTACCAAGTACT | | |
| | AATTAGCATTATAAAGTCAGAGTCTGCAGCTCCAGGCCTTTCAGTTGTTTACTAGAAAGGACAGTCTTAAGCCAGATACAGTTTACCATAAGAAAAGTTAAAG | | |
| | ATTCCCAGTGAAGCAAGTTTTTTCTTTAGCCCTAGATTCCAGGCAGAACTATTGAGCATAGATAATTTTCCCCCCTCAGGCCAGCTTTTTCTTTTTTTTTTTATTTT | | |
| | GTTAATAACAGGGAGGAGATGTAGTCTCCCCTCCCCTAGCCTGAAACCTGCTTGCTCGGGGTGGAGCTTCCTGCTCATTCGTTCTGCCACGCCCACTGCTGGA | | |
| | ACCTGAGGAGCCACACACGTGCACCTTTCTACTGGACCAGAGATTATTCGGCGGGAATCGGGTCCCCTCCCCCTTCCTTCATAACTGGTGTCGCAACAATAAA | | |
| | ATTTGAGCCTTGATCAGAGTAACTGTCTTGGCTACATTTCTTCTTTTGCCCCGTCTAGATTCCTCTCTTACAGCTCGAGCGGCCTTCTCAGTCGAACCGTTCACG | | |
| | TTGCGAGCTGCTGGCGGCCGCAACA | | |
| ETnI 1 | TGTAGTCTCCCCTCCCCTAGCCTGAAACCTGCTTGCTCAGGGGTGGAGCTTCCTGCTCATTCGTTCTGCCACGCCCACTGCTGGAACCTGCGGAGCCACACACG | 379 | 5497 |
| | TGCACCTTTCTACTGGACCAGAGATTATTCGGCGGGAATCGGGTCCCCTCCCCCTTCCTTCATAACTAGTGTCGCAACAATAAAATTTGAGCCTTGATCAGAGT | | |
| | AACTGTCTTGGCTACATTCTTTTCTCTCGCCACCTAGCCCCTCTTCTCTTCCAGGTTTCCAAAATGCCTTTCCAGGCTAGAACCCAGGTTGTGGTCTGCTGGCCG | | |
| | GACACAACAATTGGCGAACCAACGTGGGACTGAGAAACGGCAAAGGATTTTTGGAAGAGATGCTGCTGGTTCGGAGCTCCATAAAATAAAGGATAAGGGA | | |
| | AATTCATACCGGAGAAGGTATGGGCTAAGCTGAGACAGCGTTAAACCCGAGCGCTGGTTCACTTAGGTTCAGCAGTGAGGAGCTGGGTATCAGGCGGTAGG | | |
| | CCGTAGCTCTCCGAAGCTACATGAGGTGTGAGAAAAGAAAGGGTTTATTAAAAGGAATAGGCGGATTGCCCCAGTTAATAAAAAATGCATCATAAGGGAGG | | |
| | AAAATGTCCCAAAAAGCAGAGAGAAATATCTCTCTGGGCCTTATAGCAGGAGTACTCTGTTCCCTTTTGTGTCTTGTCTAATGTCCGGTGCACCAATCTGTTCT | | |
| | CGTGTTCAATTCATGTATGTTCGTGTCCAGTCTGTATGAATGAATGTTCTATGTTTTGTGTTGGATAATAAAGATGGTATAAAAAACTATCTGCAAAGCCGAGA | | |
| | GCTGCCACGTGTTTCAGCCAGGAATCAGACACGTGGCGAGAGGGCCCCTGCTGGAAAAACTGTTCGTTTTAGGAAATAAGGGCGAGTGCACAGCCTCTAAG | | |
| | TTTCAGAGTAAAAAAGCTAATAAATGGTTCATGATTAATGTGTTTGACAATGGTAAAGTGTTTTTTATTTTTATGGTTGTAGCTACAAAAATTATTATTCTCTGA | | |
| | TTGGTCTAAATGTAACTGCTTCATTTGGTTCTTTTTTATTGGTAATGTGCTCTGAGTGTTTTCACAATCAGCTCATAAGTTGTTGGTTAAGATTAATAATTGTTAC | | |
| | ATTGCTACAGATGGTTAGTGTTAAATTTGATAACTCAAGTTTAGAGTCCTTCCGACACGTGGCATAAAGCAGGCCAAGAGGCTGGGTCTCTAAAGATATTTCT | | |
| | AGTTTAGGTAATAATTAATGTGGTTCGTATCCTAAATAGTAAAATTTAAAATAAGATTTAAAGCAATGTCTCTTTATTAAAGCATTAAAGCTTGCTTTAATAGGT | | |
| | ATTCATAGGTATTAATTGACATCCAAACTTCGTAATATGATAGTAATGCTTCTAATATTGATTTTAAAGATAATAAATTGTTTTAAACTTGGGTTTTGCTTTCCCA | | |
| | AGGTTATAGGTATTATCCTAACCTTGCACAAAAAACTTAAAAATTATGGTTAAAACTGCTATTGTTCCATTGACTGCAGCTTGCAGTTTGATTTCAAATTTAAGA | | |
| | TCTTTAATTCACCTGTATACTGTAATTAAGATAATTACAAGAGTAATCATCTTATGAGAGCGCTCATACAGCTCACTTCATACAAAACTGTGACAGAGTTATCTA | | |
| | GTTATGTTTGTCTTTGTAAATAGATTAGACAAACAGTTTGGTTATAGTTGCTGCCTGGCAGGAAACTGCAGTACGGGCAATTTTTTCACAACACTAAAGTTGTG | | |
| | AAGAACGTTTTAACTGTAAGTCATCGTAAGAAAGAGTATCATAATTTAGAGGCATAGACAGTTATATTGTTTCTCTAGAATCGGTCCTTATTACAGGAGGGCC | | |
| | AAGATGCTCAGATTAAAAAGTATTTTACGTTTGAGTCAATGCAGGGCTCTGGGCAGCCCCAGAGCGGCTTGTGGCCTTTCTTTTGTTTTGCAAACAGTGCCTG | | |
| | AGAAAGATTTTTCCCTGTGTTCAAGAGAAATTCTTTTTAACAGTGTTGCAGATCTATTCAGATGTTTAAAATAATGCTTAAATTCAAAGAGTTTTGCTTCTAGTG | | |
| | AACTGTAATCACTAGAAAATTTTGCCTCTAGGTATGGCTAATGTAACTTTACATTATGTAAGAAAAAATTTTATTGTTTCTGCTTCTATACAAGAAGCCAAGAGT | | |
| | TTTAATCTTTCAGTGTATATTGTTTCCTAAGTGAAAAGTATTTTATTAACTAATGCTTCTTAAAGTTTACCTTAAATCCTTGCTCTCACCCAAAAGATTCAGAGAC | | |
| | AATATCCTTTTATTACTTAGGGTTTTAGTTTACTACAAAAGTTTCTACAAAAAAGAAAGCTTTTATAATTGTTATTAATTGGTAATTAAAAATTGGTTGTGCCCA | | |
| | AAACAATTCTTTGGCCAGAAAAAACATTATTGTAAAGTCATTTTTCTCATCCTCCCAGCCAATCGTTGGCCCATGTGGGCCCAACTAGCTTCTGTGGGGCGGAG | | |
| | TCTTAAGACACAGTTTTCCCTGTTCCAGCACAGATGATCTAGTTGTGTGCTGTAGATGGTGTTTTAAAATGCTGAACAATCAAACCTTAATTTGTATATTAATAG | | |
| | TCAATGCCATATCTCTGAGCTCGCAATTGCTTAAATTGTTCATCCCTCAGATACTATTAATTCTCAAATTTACAATTGCTTATGCATATTTCTAGTTAATAAATAA | | |
| | ATTATGCACATGTGACTCTTAATAACTTTGCAAGCCTTCTAGTTACAACTGCTCCTTAAGAAAATTGATTAAAAGTGCAATTAGTCACTGCCCCTTTACAGCCAT | | |
| | GTATTTAAAATATTTTGTCAACTAGTTATTAATTCAAAAGTTTAGGTATTATAAAATTTTAAAACTTTAACTTCTTAAAAGACAAAAAAGAGAGAAATTGTATCC | | |
| | CCGTGCATGCTATTTAGTGCATTCCCATGCACACTATTAAAGTCTTACCTTTATTTTCAAAATCTAATATTTTAATGTCAAAGAGTTTAATAAATGCTTTATAGTA | | |
| | TCTTAAAGGGATCTACTTATTGGCTTATAGATTAATCCTAAAACAACTACCTTATTAGAAAAGGGAAAAACAGGTTTTCTCCACAGAACGCTGCAGAAGCATA | | |
| | TTAGTAAATTCGTGTGACGAGCTGGTAGGTAAGTTGACTCATGTCCTGATTGAATTGACTAAAAAACTAAATTAAATTCATGTTTTAGATCCATCCTTACTTGT | | |
| | CATTTTTCCAGTTTAGACTAGCTTCTAGCCTTTTAACTTTATGGCAATAGTACATCAGAGACTGTATATTCAGACTTAGTAAAATTAGTCATTTAATAGAGTCAT | | |
| | AATGATTTTTCTCCTTTCTTCAGTGTGACCAGCCATTCTAACTCAATCTCAGACTGGTCTAATATTCAGTCCAATGTTAGAGATTCCTATATTCTAAATTACCTAA | | |
| | CAAAGTTAATTCAGAGCACATCCCCCACTTCCCCTAGATCCCTAACCTCAGAAGGATTGCTGGCCTTACAGCTAGTGGAAAAAGCTATTAAAGAGCAATTGGT | | |
| | CACTTAATACATTGGTAAAATAGAAGGACCCCCTGACTAACGAATAGAAGGGTCCAGATCCAGTTCTAATTTGGGGTAGGGACTCAGTTTGTGTTTTTTCACG | | |
| | AGATGAAGATAGAGCGCAGTGGCTGCCAGATAAATTAATTTGTTAGATGAACACAGATTCTAAATCTTCTAAAGTATCACCTTGAGGACTAAAATTCCTCTTTT | | |
| | GCTTAAAAGTCGGCTTGAGGACTCAGGCTCCGAAAAAAGCTACTCTCTGAGCCAGCTCCTGACAGGAGGCCGGAGACTAGCCTCAGCTTTACAATTTGCATTT | | |
| | AAATAAAGTACCTAGAGTTCCCCAAAAGAAGTTCTGCTTTCCTACTTTCTCACTGTCCGAGATTTTGTCTTTCAAGCAGGTAAATCAACATTCTCGAGGCGGAC | | |
| | CAGCGGATGTGCATCCCCGCCCCCCTAGCGCACACAGGTGGCTGCTGTTATCTCCTTTCCAAGGACATTTCCAGCATGTGGCTTTCAGTCTGAGTTAAAAATTA | | |
| | GGTTTACCAAGAGGGCTAGAAAAGTAGATATTTCTATATTAATAAAGATTGGTTTTTATTTTGATAGACAGGCTTAGTCCCTTAGCTGACCTCTGGCTTTTCAC | | |
| | CCTTGCTGTTACTGCAAGGTGTCCTTAGGCTGTGGAAAAAACAGGGATGAGGAGAAACGACTTCCAGCTCCTATTTTAGCCACAAATCGTGGTGTTACTAATG | | |
| | ACATAATTCTTGCTTAGGCTTTGCTAATTCTGAGGTTGATAATTCTCCTTTAGGAGCTGCACAGCACTCAGAAATGTGCATACTGGTTTGTGATTGTACAAATTC | | |
| | AGTATGGGCATCGCTTGGTGCAGAGGTACTGCAAGGGAAGGTCCGGCTTGACCATTTCTGAGTTTCCTGTGAGATAAACCCGGTTTAAAAGAGGTTGGTATC | | |
| | ATATTTTGGTTAAAAATCAAAAATATTTTCCGGCTCTGCCTCGCCTCCCCAAAAGATACCCAGAGTCACATGTGTGGGTCTTATCAATACCCACGGGAGGAATC | | |
| | GGGTCCATGTCCACCCAAGCCAAGGTTAAAAGCCCACTCATCTACGGATGAGAAAATCATTTGATCACCTCAGTTAAGCGTTGCCTTATTTAACTTAATCAATA | | |
| | GGGGGGAGAGAGATTGGAGACGTACTATTGAAAGGGCAAGCCCTTCACTGCCTCCCACCCAAATAAAAAAGCCAATTGGCCTTGTACTACAAGAGCCGGTC | | |
| | GAACTCCTTCTCCCTGTTTCCCACCTATCTTCCAAAAAAGCGGAGAAATATCAACTTAGTGTTATTATAGTGTATTTCACATTTGTTCAGTCAAACTTAGCCAGA | | |
| | GTTCCAACGCCCTACTTAAAATTCAACTAGAAAGTTACCTACCAAGTACTAATTAGCATTATAAAGTCAGAGCCTACAGCTCCAGGCTTTTCAGTTAGTTGTTC | | |
| | ACTAAGATAAGAAAGGACAGTCTTAGCCTTATACAGTTTACCATAAGAAAAGTTAAGGAATCCCATGAAAGCAAGTTTTTTCTTTAGCCCTAGATTCCAGGCA | | |
| | GAACTATTGAGCATAGATAATTTTTCCCCCCTCAGGCCAGCTTTTTTTTTTTTAAATTTTGTTAATAAAAGGGAGGAGATGTAGTCTCCCCTCCCCTAGCCTGA | | |
| | AACCTGCTTGCTCAGGGGTGGAGCTTCCTGCTCATTCGTTCTGCCACGCCCACTGCTGGAACCTGCGGAGCCACACACGTGCACCTTTCTACTGGACCAGAGA | | |
| | TTATTCGGCGGGAATCGGGTCCCCTCCCCCTTCCTTCATAACTAGTGTCGCAACAATAAAATTTGAGCCTTGATCAGAGTAACTGTCTTGGCTACATTCTTTTCT | | |
| | CTCGCCACCTAGCCCCTCTTCTCTTCCAGGTTTCCAAAATGCCTTTCCAGGCTAGAACCCAGGTTGTGGTCTGCTGGCCGGACACAACA | | |
| IAP- | TGTGTTGGGAGCCGCCCCCACATTCGCCGTTACAAGATGGCGCTGACATCCTGTGTTCTAAGTGGTAAACAAATAATCTGCGCATGTGCCAAGGGTATCTTAT | 380 | 7072 |
| RP23- | GACTACTTGTGCTCTGCCTTCCCCGTGACGTCAACTCGGCCGATGGGCTGCAGCCAATCAAGGAGTGACACGTCCGAGGCGAAGGAGAATGCTCCTTAAGAG | | |
| 231P12 | GGACGGGGTTTTCGTTTTCTCTCTCTCTTGCTTCTTGCTCTCTTTTCCTGAAGATGTAAGAATAAAGCTTTGCCGCAGAAGATTCTGGTCTGTGGTGTTCTTCCT | | |
| | GGCCGGTCGTGAGAACGCGTCTAATAACAATTGGTGCCGAATTCCGGGACGAGAAAATCCGGGACGAGAAAAAACTCCGGACTGGCGCAGGAGGGATACT | | |
| | TCATTCCAGAACCAGAACTGCGAATCAAGGTTATAAGGTTCCCGTAACACAGACTGTTGAGAAGGATTCAACTGCCGAATTCAGAACTCATCAGCTGGGGAA | | |
| | CGACGGTGATAAAGGTTCCCGTAAAGCAGACTGTTAAGAAGGATTCAACTGTATGAATTCAGAACTTTTCAGCTGGGGAACGAGAGTACCAGTGAGTATGTT | | |
| | TGGCCTTGAATTTTTTCTGGTGTTAGGAGCCCTTTTGTTCTTTTTCACATGCTATCAAGTGATTAAGATAGGGCTGAAAATTCTAGAGGAAATTCAGGACAAGC | | |
| | TATCAGAAGTAAAGCGGGAAGAAAGAGTAGGAACAAAGAGAAAATATGGTTCACAAAATAAGTATACAGGCCTTTCCAAGGGTCTTGAACCCGAGGAAAA | | |
| | GTTAAGGTTAGGTAGGAATACCTGGAGAGAGATTAGAAGAAAAAGAGGAAAAAGGGAGAAGAAAAAAGATCGATTAGCGGAGGTCTCTAGGAGATACTC | | |
| | GTCACTAGATGAGCTCAGGAAGCCAGCTCTTAGTAGCTCTGAAGCAGATGAAGAATCCTCCTCTGAGGAAACAGACTGGGAGGAAGAAGCAGCCCATTACC | | |
| | AGCCAGCTAATCGGTCAAGAAAAAAGCCAAAAGCGGCTGGCGAAGGCCAGTTTGCTAATTGGCCTCAGGGCAATCGGCTACCAGGTGCACTCCCGCCCTAT | | |
| | GCGGAGTCCCCGCCCTGCGTAGTGCGTCAGCCCGTAGTGCGTCAGCAATGCGCAGAGAGGCAGTGCGCAGACTCATTCATTCCCCGAGAGGAACAAAGGAA | | |
| | AATAGAACAGGCATTTCCAGTCTTTGAAGGAGCCGAGGGTGGGCGTGTCCACGCTCCGGTAGAATACGTACAGATTAAGGAAATTGCCGAGTCGGTTCGTA | | |
| | AATACGGAACCAATGCTAATTTTACCTTGGTGCAGTTAGACAGGCTCGCTGGCATGGCACTAACTCCTGCTGACTGGCAAACGGTTGTAAAAGCCGCTCTCCC | | |
| | TAGTATGGGCAAATATATGGAATGGAAAGCGCTTTGGCACGAAGCTGCACAGGCGCAGGCCCGAGCAAACGCAGCTGCTTTGACTCCAGAGCAGAGAGATT | | |
| | GGACTTTTGACTTGTTAACGGGTCAGGGAGCTTATTCTGCTGATCAGACAAACTACCATTGGGGAGCTTATGCCCAGATTTCTTCCACGGCTATTAGGGCCTG | | |
| | GAAGGCGCTCTCTCGAGCAGGTGAAACCACTGGTCAGTTAACAAAAATAATCCAGGGACCTCAGGAATCCTTCTCAGATTTTGTGGCCAGAATGACAGAGGC | | |
| | AGCAGAGCGTATTTTTGGAGAGTCAGAGCAAGCTGCGCCTCTCATAGAACAGCTAATCTACGAGCAAGCCACAAAGGAGTGCCGAGCGGCCATAGCCCCAA | | |
| | GAAAGAACAAAGGCTTACAAGACTGGCTCAGGGTCTGTCGAGAGCTTGGGGGACCCCTCAGCAATGCAGGTTTAGCGGCTGCCATCCTTCAATCCCAAAACC | | |
| | GCTCCATGGGCAGAAATGATCAGAGGACATGTTTTAACTGCGGAAAGCCTGGGCATTTTAAGAAAGATTGCAGAGCTCCAGATAAACAGGGAGGGACTCTC | | |
| | ACTCTTTGCTCTAAGTGTGGCAAGGGTTATCATAGAGCTGACCAGTGTCGCTCTGTGAGGGATATAAAGGGCAGAATTCTTCCCCCACCTGATAGTCAATCAA | | |
| | CTGATGTGCCAAAAAACGGGTCATCGGGCCCTCGGTCCCAGGGCCCTCAAAGATATGGGAACCGGTTTGTCAGGACCCAGGGGGCAGTCAGAGAGGCGAC | | |
| | CCAGGAAGACCCACAAGGGTGGACCTGCGTGCCGCCTCCGACTTCCTACTAATGCCTCAAATGAGTATTCAGCCGGTGCCGGTGGAGCCTATACCATCCTTGC | | |
| | CCCCGGGAACCATGGGCCTTATTCTCGGCCGAGGTTCACTCACCTTGCAGGGCTTAGTAGTCCACCCTGGAGTTATGGATTGTCAACATTCCCCTGAAATACA | | |
| | GGTCCTGTGCTCAAGCCCTAAAGGCGTTTTTTCTATTAGTAAAGGAGATAGGATAGCTCAGCTGCTGCTCCTCCCTGATAATACCAGGGAGAAATCTGCAGGA | | |
| | CCTGAGATAAAGAAAATGGGCTCCTCAGGAAATGATTCTGCCTATTTGGTTGTATCTTTAAATGATAGACCTAAGCTCCGCCTTAAGATTAATGGAAAAGAGT | | |
| | TTGAAGGCATCCTTGATACCGGAGCAGATAAAAGTATAATCTCTACACATTGGTGGCCCAAAGCATGGCCCACCACAGAGTCATCTCATTCATTACAGGGCCT | | |
| | AGGATATCAATCATGTCCCACTATAAGCTCCGTTGCCTTGACGTGGGAATCCTCTGAAGGGCAGCAAGGGAAATTCATACCTTATGTGCTCCCACTCCCGGTT | | |
| | AACCTCTGGGGAAGGGATATTATGCAGCATTTGGGCCTTATTTTGTCCAATGAAAACGCCCCATCAGGAGGGTATTCAGCTAAAGCAAAAAATATCATGGCA | | |
| | AAGATGGGTTATAAAGAAGGAAAAGGGTTAGGACATCAAGAACAGGGAAGGATAGAGCCCATCTCACCTAATGGAAACCAAGACAGACAGGGTCTGGGTT | | |
| | TTCCATAGCGGCCATTGGGGCAGCACGACCCATACCATGGAAAACAGGGGACCCAGTGTGGGTTCCTCAATGGCACCTATCCTCTGAAAAACTAGAAGCTGT | | |
| | GATTCAACTGGTAGAGGAACAATTAAAACTAGGCCATATTGAACCCTCTACCTCACCTTGGAATACTCCAATTTTTGTAATTAAGAAAAAGTCAGGAAAGTGG | | |
| | AGACTGCTCCATGACCTCAGAGCCATTAATGAGCAAATGAACTTATTTGGCCCAGTACAGAGGGGTCTCCCTGTACTTTCCGCCTTACCACGTGGCTGGAATT | | |
| | TAATTATTATAGATATTAAAGATTGTTTCTTTTCTATACCTTTGTGTCCAAGAGATAGGCCCAGATTTGCCTTTACCATCCCCTCTATTAATCACATGGAACCTGA | | |
| | TAAGAGGTATCAATGGAAGGTCTTACCACAGGGAATGTCCAATAGTCCTACAATGTGCCAACTTTATGTGCAAGAAGCTCTTTTGCCAGTGAGGAAACAGTTC | | |
| | CCCTCTTTAATTTTGCTCCTTTACATGGATGACATCCTCCTGTGCCATAAAGACCTTACCATGCTACAAAAGGCATATCCTTTTCTACTTAAAACTTTAAGTCAGT | | |
| | GGGGTTTACAGATAGCCACAGAAAAGGTCCAAATTTCTGATACAGGACAATTCTTGGGCTCTGTGGTGTCCCCAGATAAGATTGTGCCCCAAAAGGTAGAGA | | |
| | TAAGAAGAGATCACCTCCATACCTTAAATGATTTTCAAAAGCTGTTGGGAGATATTAATTGGCTCAGACCCTTTTTAAAGATTCCTTCTGCTGAATTAAGGCCT | | |
| | TTGTTTAGTATTTTAGAAGGAGATCCTCATATCTCCTCCCCTAGGACTCTTACTCTAGCTGCTAACCAGGCCTTACAAAAAGTGGAAAAAGCCTTACAGAATGC | | |
| | ACAATTACAACGTATTGAGGATTCGCAGCCTTTCAGTTTGTGTGTCTTTAAGACAGCACAATTGCCAACTGCAGTTTTGTGGCAGAATGGGCCATTGTTGTGG | | |
| | ATCCATCCAAACGTATCCCCAGCTAAAATAATAGATTGGTATCCTGATGCAATTGCACAGCTTGCCCTTAAAGGCCTAAAAGCAGCAATCACCCACTTTGGGC | | |
| | AAAGTCCATATCTTTTAATTGTACCTTATACCGCTGCACAGGTTCAAACCTTGGCAGCCGCATCTAATGATTGGGCAGTTTTAGTTACCTCCTTTTCAGGAAAAA | | |
| | TAGATAACCATTATCCAAAACATCCAATCTTACAGTTTGCCCAAAATCAATCTGTTGTGTTTCCACAAATAACAGTAAGAAACCCACTTAAAAATGGGATTGTG | | |
| | GTATATACTGATGGATCAAAAACTGGCATAGGTGCCTATGTGGCTAATGGTAAAGTGGTATCCAAACAATATAATGAAAATTCACCTCAAGTGGTAGAATGTT | | |
| | TAGTGGTCTTAGAAGTTTTAAAAACCTTTTTAAAACCCCTTAATATTGTGTCAGATTCCTATTATGTGGTTAATGCAGTAAATCTTTTAGAAGTGGCTGGAGTG | | |
| | ATTAAGCCTTCCAGTAGAGTTGCCAATATTTTTCAGCAGATACAATTAGTTTTGTTATCTAGAAGATCTCCTGTTTATATTACTCATGTTAGAGCCCATTCAGGC | | |
| | CTACCTGGCCCCATGGCTCTGGGAAATGATTTGGCAGATAAGGCCACTAAAGTGGTGGCTGCTGCCCTATCATCCCCGGTAGAGGCTGCAAGAAATTTTCAT | | |
| | AACAATTTTCATGTGACGGCTGAAACATTACGCAGTCGTTTCTCCTTGACAAGAAAAGAAGCCCGTGACATTGTTACTCAATGTCAAAGCTGCTGTGAGTTCTT | | |
| | GCCAGTTCCTCATGTGGGAATTAACCCACGCGGTATTCGACCTCTACAGGTCTGGCAAATGGATGTTACACATGTTTCTTCCTTTGGAAAACTTCAATATCTCC | | |
| | ATGTGTCCATTGACACATGTTCTGGCATCATGTTTGCTTCTCCGTTAACTGGAGAAAAAGCCTCACATGTGATTCAACATTGTCTTGAGGCATGGAGTGCTTGG | | |
| | GGGAAACCCAGACTCCTTAAGACTGATAATGGACCAGCTTATACGTCTCAAAAATTCCAACAGTTCTGCCGTCAGATGGACGTGACCCACCTGACTGGACTTC | | |
| | CATACAACCCTCAAGGACAGGGTATTGTTGAGCGTGCGCATCGCACCCTCAAAGCCTATCTTATAAAACAGAAGAGGGGAACTTTTGAGGAGACTGTACCCC | | |
| | GAGCACCAAGAGTGTCGGTGTCTTTGGCACTCTTTACACTTAATTTTTTAAATATTGATGCTCATGGCCATACTGCGGCTGAACGTCATTGTTCAGAGCCAGAT | | |
| | AGGCCCAATGAGATGGTTAAATGGAAAAATGTCCTTGATAATAAATGGTATGGCCCGGATCCTATCTTGATAAGATCCAGGGGAGCTATCTGTGTTTTCCCAC | | |
| | AGAATGAAGACAACCCATTTTGGGTACCAGAAAGACTCACCCGAAAAATCCAGACTGACCAAGGGAATACTAATGTCCCTCGTCTTGGTGATGTCCAGGGCG | | |
| | TCAATAATAAAGAGAGAGCAGCGTTGGGGGATAATGTCGACATTTCCACTCCCAATGACGGTGATGTATAATGCTCAAGTATTCTCCTGCTTTTTTACCACTAA | | |
| | CTAGGAACTGGGTTTGGCCTTAATTCAGACAGCCTTGGCTCTGTCTGGACAGGTCCAGATGACTGACACCATTAACACTTTGTCAGCCTCAGTGACTACAGTC | | |
| | ATAGATGAACAGGCCTCAGCTAATGTCAAGATACAGAGAGGTCTCATGCTGGTTAATCAACTCATAGATCTTGTCCAGATACAACTAGATGTATTATGACAAA | | |
| | TAACTCAGCAGGGATGTGAACAAAAGTTTCCGGGATTGTGTGTTATTTCCATTCAGTATGTTAAATTTACTAGGGCAGCTAATTTGTCAAAAAGTCTTTTTCAG | | |
| | TATATGTTACAGAATTGGATGGCTGAATTTGAACAGACCCTTCGAGGCTTGCCATCATTCAGGTCAACTCCACGCGCTTGGACCTGTCCCTGACCAAAGGATT | | |
| | ACCCAATTGGATCTCCTCAGCATTTTCTTTCTTTAAAAAATGGGTGGGATTAATATTATTTGGAGATACACTTTGCTGTGGATTAGTGTTGCTTCTTTGATTGGT | | |
| | CTGTAAGCTTAAGGCCTAAACTAGGAGAGACAAGGTGGTTATTGCCCAGGCGCTTGCAGGACTAGAACATGGAGCTTCCCCTGATATATCTATGCTTAGGCA | | |
| | ATAGGTCGCTGGCCACTCAGCTCTTATATCTCACGAGGCTAGTCTCATTGCACGAGATAGAGTGAGTGTGCTTCAGCAGCCCGAGAGAGTTGCAAGGCTAAG | | |
| | CACTGCAATGGAAAGGCTCTGCGGCATATATGAGCCTATTCTAGGGAGACATGTCATCTTTCATGAAGGTTCAGTGTCCTAGTTCCCTTCCCCCAGGCAAAAC | | |
| | GACACGGGAGCAGGTCAGGGTTGCTCTGGGTAAAAGCCTGTAAGCCTAAGAGCTAATCCTGTACATGGCTCCTTTACCTACACACTGGGGATTTGACCTCTAT | | |
| | CTCCACTCTCATTAATATGGGTGGCCTATTTGCTCTTATTAAAAGAAAAAGGGGGAGATGTTGGGAGCCGCCCCCACATTCGCCGTTACAAGATGGCGCTGAC | | |
| | ATCCTGTGTTCTAAGTGGTAAACAAATAATCTGCGCATGTGCCAAGGGTATCTTATGACTACTTGTGCTCTGCCTTCCCCGTGACGTCAACTCGGCCGATGGGC | | |
| | TGCAGCCAATCAAGGAGTGACACGTCCGAGGCGAAGGAGAATGCTCCTTAAGAGGGACGGGGTTTTCGTTTTCTCTCTCTCTTGCTTCTTGCTCTCTTTTCCTG | | |
| | AAGATGTAAGAATAAAGCTTTGCCGCAGAAGATTCTGGTCTGTGGTGTTCTTCCTGGCCGGTCGTGAGAACGCGTCTAATAACA | | |
| IAP- | TGTTGGGAGCCGCGCCCACATTCGCCGTTACAAGATGGCGCTGACAGCTGTGTTCTAAGTGGTAAACAAATAATCTGCGCATGTGCCAAGGGTATCTTATGA | 381 | 7086 |
| RP23- | CTACTTGTGCTCTGCCTTCCCCGTGACGTCAACTCGGCCGATGGGCTGCAGCCAATCAGGGAGTGACACGTCCGAGGCGAAGGAGAATGCTCCTTAAGAGG | | |
| 262J21 | GACGGGGTTTCGTTTTCTCTCTCTCTTGCTTCTTGCTCTCTTGCTTCTTACACGCTTGCTCCTGAAGATGTAAGAAATAAAGCTTTGCCGCAGAAGATTCTGGTC | | |
| | TGTGGTGTTCTTCCTGGCCGGTCGTGAGAACGCGTCTAATAACAATTGGTGCCGAATTCCGGGACGAGAAAAAACTCGGGACTGGCGCAAGGAAGATCCCT | | |
| | CATTCCAGAACCAGAACTGCGGGTCGCGGTAATAAAGGTTCCCGTAAAGCAGACTGTTAAGAAGGATTCAACTGTATGAATTCAGAACTTTTCAGCTGGGGA | | |
| | ACGAGAGTACCAGTGAGTACAGCTTTACGAGGTAAGTCCGATCTTGAACTTTCTAACGAAATTCAAGACAGTCTATCAGAAGTAAAGTGGAATATGTTTGGC | | |
| | CTTGAATTTTTTCTGGTGTTAGGAGCCCTTTTGTTCCTTTTCACATGTTATCAAGTGATTAAGATAGGGCTGAAAATTCTAGAGGAAATTCAGGACAAGCTATC | | |
| | AGAAGTAAAGCGGGGAGAGAGAGTAGGAGCAAAGAGGAAATATGGTACACAAAATAAGTATACAGGCCTTTCCAAGGGTCTTGAACCCGAGGAAAAGTTA | | |
| | AGGTTAGGTAGGAATACCTGGAGAGAGATTAGAAGAAAAAGAGGAAAAAGGGAAAAGAAGAAAGATCAATTAGCGGAGGTCTCTAGGAGATACTCGTCA | | |
| | CTAGATGAGCTCAGGAAGCCAGCTCTTAGTAGTTCTGAAGCAGGTGAAGAATCCTCCTCTGAGGAAACAGACTGGGAGGAAGAAGCAGCCCATTACCAGCC | | |
| | AGCTAATTGGTCAAGAAAAAAGCCAAAAGCGGCTGGCGAAGGCCAGTTTGCTGATTGGCCTCAGGGCAGTCGGCTTCAAGGTCCGCCCTATGCGGAGTCCC | | |
| | CGCCCTGCGTAGTGCGTCAGCAATGCGCAGAGAGATGCGCAGAGAGGCAGTGCGCAGAGAGGCAGTGCGCAGACTCATTCATTCCCAGAGAGGAACAAAG | | |
| | GAAAATACAACAGGCATTTCCGGTCTTTGAAGGAGCCGAGGGTGGGCGTGTCCACGCTCCGGTAGAATACTTACAAATTAAAGAAATTGCCGAGTCGGTTCG | | |
| | TAAATACGGAACCAATGCTAATTTTACCTTGGTGCAGTTAGACAGGCTCGCTGGCATGGCACTAACTCCTGCTGACTGGCAAACGGTTGTAAAAGCCGCTCTC | | |
| | CCTAGTATGGGCAAATATATGGAATGGAGAGCGCTTTGGCATGAAGCTGCACAAGCGCAGGCCCGAGCAAACGCAGCTGCTTTGACTCCAGAGCAGAGAGA | | |
| | TTGGACTTTTGACTTGTTAACGGGTCAGGGAGCTTATTCTGCTGATCAGACAAACTACCATTGGGGAGCTTATGCCCAGATTTCTTCCACGGCTATTAGGGCCT | | |
| | GGAAGGCGCTCTCTCGAGCAGGTGAAACCACTGGTCAGTTAACAAAGATAATCCAGGGACCTCAGGAATCCTTCTCAGATTTTGTGGCCAGAATGACAGAGG | | |
| | CAGCAGAGCGTATTTTTGGAGAGTCAGAGCAAGCTGCGCCTCTGATAGAACAGCTAATCTATGAGCAAGCCACAAAGGAGTGCCGAGCGGCCATAGCCCCA | | |
| | AGAAAGAACAAAGGCTTACAAGACTGGCTCAGGGTCTGTCGAGAGCTTGGGGGACCTCTCACCAATGCAGGCTTAGCGGCCGCCATCCTCCAATCTCAGAAC | | |
| | CGCTCCATGAGCAGAAATGATCAGAGGACATGTTTTAATTGCGGAAAGCCTGGGCATTTTAAGAAAGATTGCAGAGCTCCAGATAAACAGGGAGGGACTCT | | |
| | CACTCTTTGCTCTAAGTGTGGCAAGGGTTATCATAGAGCTGACCAGTGTCGCTCTGTGAGGGATATAAAGGGCAGAATTCTTCCCCCACCTGATAGTCAATCA | | |
| | ACTGATGTGCCAAAAAACGGGTCATCGGGCCCTCGGTCCCAGGGCCCTCAAAGATATGGGAACCGGTTTGTCAGGACCCAGGAAGCAGTCAGAGAGGCGAC | | |
| | CCAGGAAGACCCACAAGGGTGGACCTGCGTGCCGCCTCCGACTTCCTATTAATGCCTCAAATGAGTATTCAGCCGGTGCCAGTGGAGCCTATACCATCCTTGC | | |
| | CCCCGGGAACCATGGGCCTTATTCTCGGCCGGGGTTCACTCACCTTGCAGGGCTTAGTAGTCCACCCTGGAGTTATGGATTGTCAACATTCCCCTGAAATACA | | |
| | GGTCCTGTGCTCAAGCCCTAAAGGCGTTTTTTCTATTAGTAAAGGAGATAGGATAGCTCAGCTGCTGCTCCTCCCTGATAATACCAGGGAAAAATCTGCAGGA | | |
| | CCTGAGATAAAGAAAATGGGCTCCTCAGGAAATGATTCTGCCTATTTGGTTGTATCTTTAAATGATAGACCTAAGCTCCGCCTTAAGATTAATGGAAAAGAGT | | |
| | TTGAAGGCATCCTTGATACCGGAGCAGATAAAAGTATAATTTCTACACATTGGTGGCCCAAAGCATGGCCCACCACAGAGTCATCTCATTCATTACAGGGCCT | | |
| | AGGTTATCAATCATGTCCCACTATAAGCTCCATTGCCTTGACGTGGGAATCCTCTGAAGGGCAGCAAGGGAAATTCATACCTTATGTGCTCCCACTCCCGGTTA | | |
| | ACCTCTGGGGAAGGGATATTATGCAGCATTTGGGCCTTATTTTGTCCAATGAAAACGCCCCATCGGGAGGGTATTCAACTAAAGCAAAAAATATCATGGCAA | | |
| | AGATGGGTTATAAAGAAGGAAAAGGGTTAGGACATCAAGAACAGGGAAGGATAGAGCCCATCTCACCTAATGGAAACCAAGACAGACAGGGTCTGGGTTT | | |
| | TTCCTTAGCGGCCATTGGGGCAGCACGACCCATACCATGGAAAACAGGGGACCCAGTGTGGGTTCCTCAATGGCACCTATCCTCTGAAAAACTAGAAGCTGT | | |
| | GATTCAACTGGTAGAGGAACAATTAAAATTAGGCCATATTGAACCCTCTACCTCACCTTGGAATACTCCAATTTTTGTAATTAAGAAAAAGTCAGGAAAGTGG | | |
| | AGACTGCTCCATGACCTCAGAGCCATTAATGAGCAAATGAACTTATTTGGCCCAGTACAGAGGGGTCTCCCTGTACTTTCCGCCTTACCACGTGGCTGGAATT | | |
| | TAATTATTATAGATATTAAAGATTGTTTCTTTTCTATACCTTTGTGTCCAAGGGATAGGCCCAGATTTGCCTTTACCATCCCCTCTATTAATCACATGGAACCTGA | | |
| | TAAGAGGTATCAATGGAAGGTCTTACCACAGGGAATGTCCAATAGTCCTACAATGTGCCAACTTTATGTGCAAGAAGCTCTTTTGCCAGTGAGGGAACAATTC | | |
| | CCCTCTTTAATTTTGCTCCTTTACATGGATGACATCCTCCTGTGCCATAAAGACCTTACCATGCTTCAAAAGGCATATCCTTTTCTACTTAAAACTTTAAGTCAGT | | |
| | GGGGTTTACAGATAGCCACAGAAAAGGTCCAAATTTCTGATACAGGACAATTCTTGGGCTCTGTGGTGTCCCCAGATAAGATTGTGCCCCAAAAGGTAGAGA | | |
| | TAAGAAGAGATCACCTCCATACCTTAAATGATTTTCAAAAGCTGTTGGGAGATATTAATTGGCTCAGACCTTTTTTAAAGATTCCTTCCGCTGAGTTAAGGCCT | | |
| | TTGTTTAGTATTTTAGAAGGAGATCCTCATATCTCCTCCCCTAGGACTCTTACTCTAGCTGCTAACCAGGCCTTACAAAAAGTGGAAAAGGCCTTACAGAATGC | | |
| | ACAATTACAACGTATTGAGGATTCGCAACCTTTCAGTTTGTGTGTCTTTAAGACAGCACAATTGCCAACTGCAGTTTTGTGGCAGAATGGGCCATTGTTGTGG | | |
| | ATCCATCCAAACGTATCCCCAGCTAAAATAATAGATTGGTATCCTGATGCAATTGCACAGCTTGCCCTTAAAGGTCTAAAAGCAGCAATCACCCACTTTGGGCA | | |
| | AAGTCCATATCTTTTAATTGTACCTTATACCGCTGCACAGGTTCAAACCTTGGCAGCCACATCTAATGATTGGGCAGTTTTAGTTACCTCCTTTTCAGGAAAAAT | | |
| | AGATAACCATTATCCAAAACATCCAATCTTACAGTTTGCCCAAAATCAATCTGTTGTGTTTCCACAAATAACAGTAAGAAACCCACTTAAAAATGGGATTGTGG | | |
| | TATATACTGATGGATCAAAAACTGGCATAGGTGCCTATGTGGCTAATGGTAAAGTGGTATCCAAACAATATAATGAAAATTCACCTCAAGTGGTAGAATGTTT | | |
| | AGTGGTCTTAGAAGTTTTAAAAACCTTTTTAGAACCCCTTAATATTGTGTCAGATTCCTGTTATGTGGTAAATGCAGTAAATCTTTTAGAAGTGGCTGGAGTGA | | |
| | TTAAGCCTTCCAGTAGAGTTGCCAATATTTTTCAGCAGATACAATTAGTTTTGTTATCTAGAAGATCTCCTGTTTATATTACTCATGTTAGAGCCCATTCAGGCC | | |
| | TACCTGGCCCCATGGCTCTGGGAAATGATTTGGCAGATAAGGCCACTAAAGTGGTGGCTGCTGCCCTATCATCCCCGGTAGAGGCTGCAAGAAATTTTCATA | | |
| | ACAATTTTCATGTGACGGCTGAAACATTACGCAGTCGTTTCTCCTTGACAAGAAAAGAAGCCCGTGACATTGTTACTCAATGTCAAAGCTGCTGTGAGTTCTTG | | |
| | CCAGTTCCTCATGTGGGAATTAACCCACGCGGTATTCGACCTCTACAGGTCTGGCAAATGGATGTTACACATGTTTCTTCCTTTGGAAAACTTCAATATCTCCAT | | |
| | GTGTCCATTGACACATGTTCTGGCATCATGTTTGCTTCTCCGTTAACCGGAGAAAAAGCCTCACATGTGATTCAACATTGTCTTGAGGCATGGAGTGCTTGGG | | |
| | GGAAACCCAGACTCCTTAAGACTGATAATGGACCAGCTTATACGTCTCAAAAATTCCAACAGTTCTGCCGTCAGATGGACGTAACCCACCTGACTGGACTTCC | | |
| | GTACAACCCTCAAGGACAGGGTATTGTTGAGCGTGCGCATCGCACCCTCAAAGCCTATCTTATAAAACAGAAGAGGGGAACTTTTGAGGAGACTGTACCCCG | | |
| | AGCACCAAGAGTGTCGGTGTCTTTGGCACTCTTTACACTCAATTTTTTAAATATTGATGTTCATGGCCATACTGCGGCTGAACGTCATTGTTCAGAGCCAGATA | | |
| | GGCCCAATGAGATGGTTAAATGGAAAAATGTCCTTGATAATAAATGGTATGGCCCGGATCCTATCTTGATAAGATCCAGGGGAGCTGTCTGTGTTTTCCCACA | | |
| | GAATGAAGACAACCCATTTTGGGTACCAGAAAGACTCACCCGAAAAATCCAGACTGACCAAGGGAATACTAATGTCCCTCGTCTTGGTGATGTCCAGGGCGT | | |
| | CAATAATAAAGAGAGAGCAGCGTTGGGGGATAATGTCGACATTTCCACTCCCAATGACGGTGATGTATAATGCTCAAGTATTCTCCTGCTTTTTTACCACTAAC | | |
| | TAGGAACTGGGTTTAGCCTTAATTCAGACAGCCTTAGCTCTGTCTGGACAGGTCCAGACGACTGACACCATTAACACTTTGTCAGCCTCAGTGACTACAGTCA | | |
| | TAGATAAACAGGCCTCAGCTAATGTCAAGATACAGGGAGGTCTCATGCTGGTTAATCAACTCATAGATCTTGTCCAGATACAACTAGATGTATTATGACAAAT | | |
| | AACTCAGCAGGGATGTGAACAAAAGTTTCCGGGATTGTGTGTTATTTCCATTCAGTATGTTAAATTTACTAGGACAGCTAATTTGTCAAAAAGTCTTTTTCAGT | | |
| | ATATGTTACAGAATTGGATGGCTGAATTTGAACAGATCCTTCGGGAATTGAGACTTCAGGTCAACTCCACGCGCTTGGACCTGTCGCTGACCAAAGGATTACC | | |
| | CAATTGGATCTCCTCAGCATTTTCTTTCTTTAAAAAATGGGTGGGATTAATATTATTTGGAGATACACTTTGCTGTGGATTAGTGTTGCTTCTTTGATTGGTCTG | | |
| | TAAGCTTAAGGCCCAAACTAGGAGAGACAAGGTGGTTATTGCCCAGGCGCTTGCAGGACTAGAACATGGAGCTTCCCCTGATATATCTATGCTTAGGCAATA | | |
| | GGTCGCTGGCCACTCAGCTCTTATATCCCATGAGGCTAGACTCATTGCACGGGATAGAGTGAGTGTGCTTCAGCAGCCCGAGAGAGTTGCAAGGCTAAGCAC | | |
| | TGCAATGGAAAGGCTCTGCGGCATATATGAGCCTATTCTAGGGAGACATGTCATCTTTCATGAAGGTTCAGTGTCCTAGTTCCCTTCCCCCAGGCAAAACGAC | | |
| | ACGGGAGCAGGTCAGGGTTGCTCTGGGTAAAAGCCTGTGAGCCTAAGAGCTAATCCTGTACATGGCTCCTTTACCTACACACTGGGGATTTGACCTCTATCTC | | |
| | CACTCTCATTAATATGGGTGGCCTATTTGCTCTTATTAAAAGGATAGGGGGAGATGTTGGGAGCCGCGCCCACATTCGCCGTTACAAGATGGCGCTGACAGC | | |
| | TGTGTTCTAAGTGGTAAACAAATAATCTGCGCATGTGCCAAGGGTATCTTATGACTACTTGTGCTCTGCCTTCCCCGTGACGTCAACTCGGCCGATGGGCTGC | | |
| | AGCCAATCAGGGAGTGACACGTCCGAGGCGAAGGAGAATGCTCCTTAAGAGGGACGGGGTTTCGTTTTCTCTCTCTCTTGCTTCTTGCTCTCTTGCTTCTTACA | | |
| | CGCTTGCTCCTGAAGATGTAAGAAATAAAGCTTTGCCGCAGAAGATTCTGGTCTGTGGTGTTCTTCCTGGCCGGTCGTGAGAACGCGTCTAATAACA | | |
| IAP- | TGTGGGAAGCCGCCCCCACATTCGCCGTCACAAGATGGCGCTGACATCCTGTGTTCTAAGTTGGTAAACAAATAATCTGCGCATGAGCCAAGGGTATTTACG | 382 | 7119 |
| RP23- | ACTACTTGTACTCTGTTTTTCCCGTGAACGTCAGCTCGGCCATGGGCTGCAGCCAATCAGGGAGTGATGCGTCCGAGGCAATTGTTGTTCTCTTTAAAGAGGA | | |
| 31B18 | AAGGGGTTTCGTTTTCTCTCTCTCTTGCTTCTTACACTCTGGCCCCATAAGATGTAAGCAATAAAGCTTTGCCGTAGAAGATTCTGGGTGTTGTGTTCTTCCTGG | | |
| | CCGGTCGTGAGAACGCGTCGAATAACAATTGGTGCCGAAAACCCGAGACGAGAAAAAACTCCGGACTGGCGCAGGGAAGATCCCTCATTCCGGAACCAGAA | | |
| | CTGCGGATCACGTTTATAAAGGTTCCCGTAACACAGACTGTTGAGAAGGATTCAACTGCCGAATTCAGAACTCATCAGCTGGGGAACGACGGTGATAAAGGT | | |
| | TCCCGTAAAGCAGACTGTTAAGAAGGATTCAACTGTATGAATTCAGAACTTTTCAGCTGGGGAACGAGAGTACCAGTGAGTATGTTTGGCCTTGAATTTTTTC | | |
| | TGGTGTTAGGAGCCCTTTTGTTCTTTTTCACATGTTATCAAGTGATTAAGATAGGGCTGAAAATTCTAGAGGAAATTCAGGACAAGCTATCAGAAGTAAAGCG | | |
| | GGAAGAAAGAGTAGGAACAAAGAGGAAGTATGGTACACAAAATAAGTATACAGGCCTTTCCAAGGGTCTTGAACCCGAGGAAAAGTTAAGGTTAGGTAGG | | |
| | AATACCTGGAGAGAGATTAGAAGAAAAAGAGGAAAAAGGGAAAAGAAGAAAGATCGATTAGCGGAGGTCTCTAGGAGATACTCGTCACTAGATGAGCTCA | | |
| | GGAAGCCAGCTCTTAGTAGCTCTGAAGCAAGTGAAGAATCCTCCTCTGAGGAAACAGACTGGGAGGAAGAAGCAGCCCATTACCAGCCAGCTAATTGGTCA | | |
| | AGAAAAAAGCCAAAAGCGGCTGGCGAAAGTCAGCGTACTGTTCAACCTCCCGGCAGTCGGTTTCAAGGTCCGCCCTATGCGGAGCCCCCGCCCTGCGTAGTG | | |
| | CGTCAGCAATGCGCAGAGAGGCAATGCGCAGAGAGATGCGCAGAGAGGCAGTGCGCAGAGAGATGCGCAGAGAGGCAGTGCGCAGAGAGGCAGTGCGC | | |
| | AGAGAGGCAGTGCGCAGACTCATTCATTCCCCGAGAGGAACAAAAGAAAATACAACAGGCATTTCCAGTCTTTGAAGGAGCCGAGGGTGGGCGTGTCCACG | | |
| | CTCCGGTAGAATACGTACAGATTAAGGAAATTGCCGAGTCGGTTCGTAAATACGGAACCAATGCTAATTTTACCTTGGCGCAGTTAGACAGGCTCGCTGGCA | | |
| | TGGCACTAACGCCTGCTGATTGGCAGACGGTTGTAAAAGCCGCTCTCCCTAGTATGGGCAAATATATGGAATGGAAAGCGCTTTGGCACGAAGCTGCACAGG | | |
| | CGCAGGCCCGAGCAAACGCAGCTGCTTTGACTCCAGAGCAGAGAGATTGGACTTTTGACTTGTTAACGGGTCAGGGAGCTTATTCTGCTGATCAGACAAACT | | |
| | ACCATTGGGGAGCTTATGCCCAGATTTCTTCCACGGCTATTAGGGCCTGGAAGGCGCTCTCTCGAGCAGGTGAAACCACTGGTCAGTTAACAAAGATAATCC | | |
| | AGGGACCTCAGGAATCTTTCTCAGATTTTGTGGCCAGAATGACAGAGGCAGCAGAGCGTATTTTTGGAGAGTCAGAGCAAGCTGCGCCTCTCATAGAACAGC | | |
| | TAATCTACGAGCAAGCCACAAAGGAGTGCCGAGCGGCCATAGCCCCAAGAAAGAACAAAGGCTTACAAGACTGGCTCAGGGTCTGTCGAGAGCTTGGGGG | | |
| | ACCTCTCAGCAATGCAGGTTTAGCGGCTGCCATCCTTCAATCTCAGAACCGCTCCATGGGCAGAAATGATCAGAGGACATGTTTTAATTGCGGAAAGCCTGG | | |
| | GCATTTTAAGAAAGATTGCAGAGCTCCAGATAAACAGGGAGGGACTCTCACTCTTTGCTCTAAGTGTGGCAAGGGTTATCATAGAGCTGACCAGTGTCGCTC | | |
| | TGTGAGGGATATAAAGGGCAGAATTCTTCCCCCACCTGATAGTCAATCAACTGATGTGCCAAAAAACGGGTCATCGGGCCCTCGGTCCCAGGGCCCTCAAAG | | |
| | ATATGGGAACCGGTTTGTCAGGACCCAGGAAGCAGTCAGAGAGACGACCCAGGAAGACCCACAAGGGTGGACCTGCGTGCCGCCTCCGACTTCCTATTAAT | | |
| | GCCTCAAATGAGTATTCAGCCGGTGCCGGTGGAGCCTATACCATCCTTGCCCCCGGGAACCATGGGCCTTATTCTCGGCCGAGGTTCACTCACCTTGCAGGGC | | |
| | TTAGTAGTCCACCCTGGAGTTATGGATTGTCAACATTCCCCTGAAATACAGGTCCTGTGCTCAAGCCCTAAAGGCGTTTTTTCTATTAGTAAAGGAGATAGGAT | | |
| | AGCTCAGCTGCTGCTCCTCCCTGATAATACCAGGGAGAAATCTGCAGGACCTGAGATAAAGAAAATGGGCTCCTCAGGAAATGATTCTGCCTATTTGGTTGTA | | |
| | TCTTTAAATGATAGACCTAAGCTCCGCCTTAAGATTAATGGAAAAGAGTTTGAAGGCATCCTTGATACCGGAGCAGATAAAAGTATAATTTCTACACATTGGT | | |
| | GGCCCAAAGCATGGCCCACCACAGAGTCATCTCATTCATTACAGGGCCTAGGATATCAATCATGTCCCACTATAAGCTCCGTTGCCTTGACGTGGGAATCCTC | | |
| | TGAAGGGCAGCAAGGGAAATTCATACCTTATGTGCTCCCACTCCCGGTTAACCTCTGGGGAAGGGATATTATGCAGCATTTGGGCCTTATTTTGTCCAATGAA | | |
| | AACGCCCCATCAGGAGGGTATTCAGCTAAAGCAAAAAATATCATGGCAAAGATGGGTTATAAAGAAGGAAAAGGGTTAGGACATCAAGAACAGGGAAGGA | | |
| | TAGAGCCTATCTTACCTAATGGAAACCAAGACAGACAGGGTCTGGGTTTTTCCTTAGCGGCCATTGGGGCAGCACGACCCATACCATGGAAAACAGGGGACC | | |
| | CAGTGTGGGTTCCTCAATGGCACCTATCCTCTGAAAAACTAGAAGCTGTGATTCAACTGGTAGAGGAACAATTAAAACTAGGCCATATTGAACCCTCTACCTC | | |
| | ACCTTGGAATACTCCAATTTTTGTAATTAAGAAAAAGTCAGGAAAGTGGAGACTGCTCCATGACCTCAGAGCCATTAATGAGCATATGAACTTATTTGGCCCA | | |
| | GTACAGAGGGGTCTCCCTGTACTTTCCGCCTTACCACGTGGCTGGAATTTAATCATTATAGATATTAAAGATTGTTTCTTTTCTATACCTTTGTGTCCAAGGGAT | | |
| | AGGCCCAGATTTGCCTTTACCATCCCCTCTATTAATCACATGGAACCTGATAAGAGGTATCAATGGAAGGTCTTACCACAGGGAATGTCCAATAGTCCTACTAT | | |
| | GTGTCAACTTTATGTACAAGAAGCTCTTTTGCCAGTGAGGGAACAATTCCCCTCTTTAATTTTGCTCCTTTACATGGATGACATCCTCCTGTGCCATAAAGACCT | | |
| | TACCATGCTACAAAAGGCATATCCTTTTCTACTTAAAACTTTAAGTCAGTGGGGTTTACAGATAGCCACAGAAAAGGTCCAAATTTCTGATACAGGACAATTCT | | |
| | TGGGCTCTGTGGTGTCCCCAGATAAGATTGTGCCCCAAAAGGTAGAGATAAGAAGAGATCACCTCCATACCTTAAATGATTTTCAAAAGCTGTTGGGAGATA | | |
| | TTAATTGGCTCAGACCTTTTTTAAAGATTCCTTCCGCTGAGTTAAGGCCTTTGTTTAGTATTTTAGAAGGAGATCCTCATATCTCCTCCCCTAGGACTCTTACTCT | | |
| | AGCTGCTAACCAGGCCTTACAAAAGGTGGAAAAAGCCTTACAGAATGCACAATTACAACGTATTGAGGATTCGCAGCCTTTCAGTTTGTGTGTCTTTAAGACA | | |
| | GCACAATTACCAACTGCAGTTTTGTGGCAGAATGGGCCATTGTTGTGGATCCATCCAAACGTATCCCCAGCTAAAATAATAGATTGGTATCCTGATGCAATTG | | |
| | CACAGCTTGCCCTTAAAGGCCTAAAAGCAGCAATCACCCACTTTGGGCAAAGTCCATATCTTTTAATTGTACCTTATACCGCTGCACAGGTTCAAACCTTGGCA | | |
| | GCCACATCTAATGATTGGGCAGTTTTAGTTACCTCCTTTTCAGGAAAAATAGATAACCATTATCCAAAACATCCAATCTTACAGTTTGCCCAAAATCAATCTGTT | | |
| | GTGTTTCCACAAATAACAGTAAGAAACCCACTTAAAAATGGGATTGTGGTATATACTGATGGATCAAAAACTGGCATAGGTGCCTATGTGGCTAATGGTAAA | | |
| | GTGGTATCCAAACAGTATAATGAAAATTCACCTCAAGTGGTAGAATGTTTAGTGGTCTTAGAAGTTTTAAAAACCTTTTTAGAACCCCTTAATATTGTGTCAGA | | |
| | TTCCTGTTATGTGGTAAATGCAGTAAATCTTTTAGAAGCGGCTGGAGTGATTAAGCCTTCCAGTAGAGTTGCCAATATTTTTCAGCAGATACAATTAGTTTTGT | | |
| | TATCTAGAAGATCTCCTGTTTATATTACTCATGTTAGAGCCCACTCAGGCCTACCTGGCCCCATGGCTCTGGGAAATGATTTGGCAGATAAGGCCACTAAAGT | | |
| | GGTGGCTGCTGCCCTATCATCCCCGGTAGAGGCTGCAAGAAATTTTCATAACAATTTTCATGTGACGGCTGAAACATTACGCAGTCGTTTCTCCTTGACAAGA | | |
| | AAAGAAGCCCGTGACATTGTTACTCAATGTCAAAGCTGCTGTGAGTTCTTGCCAGTTCCTCATGTGGGAATTAACCCACGCGGTATTCGACCTCTACAGGTCT | | |
| | GGCAAATGGATGTTACACATGTTTCTTCCTTTGGAAAACTTCAATATCTCCATGTGTCCATTGACACATGTTCTGGCATCATGTTTGCTTCTCCGTTAACTGGAG | | |
| | AAAAAGCCTCACATGTGATTCAACATTGTCTTGAGGCATGGAGTGCTTGGGGGAAACCCAGACTCCTTAAGACTGATAATGGACCAGCTTATACGTCTCAAAA | | |
| | ATTTCAACAGTTCTGCCGTCAGATGGACGTAACCCACCTGACTGGACTTCCATACAACCCTCAAGGACAGGGTATTGTTGAGCGTGCGCATCGCACCCTCAAA | | |
| | GCCTATCTTATAAAACAGAAGAGGGGAACTTTTGAGGAGACTGTACCCCGAGCACCAAGAGTGTCGGTGTCTTTGGCACTCTTTACACTCAATTTTTTAAATA | | |
| | TTGATGCTCATGGCCATACTGCGGCTGAACGTCATTGTTCAGAGCCAGATAGGCCCAATGAGATGGTTAAATGGAAAAATGTTCTTGATAATAAATGGTATG | | |
| | GCCCGGATCCTATCTTGATAAGATCCAGGGGAGCTATCTGTGTTTTCCCACAGAATGAAGACAACCCATTTTGGGTACCAGAAAGACTCACCCGAAAAATCCA | | |
| | GACTGACCAAGGGAATACTAATGTCCCTCGTCTTGGTGATGTCCAGGGCGTCAATAATAAAGAGAGAGCAGCGTTGGGGGATAATGTCGACATTTCCACTCC | | |
| | CAATGACGGTGATGTATAATGCTCAAGTATTCTCCTGCTTTTTTACCACTAACTGGGAACTGGGTTTGGCCTTAATTCAGACAGCCTTGGCTCTGTCTGGACAG | | |
| | GTCCAGATGACTGACACCATTAACACTTTGTCAGCCTCAGTGACTACAGTCATAGATGAACAGGCCTCAGCTAATGTCAAGATACAGAGAGGTCTCATGCTGG | | |
| | TTAATCAACTCATAGATCTTGTCCAGAAACAACTAGATGTATTATGACAAATAACTCAGCAGGGATGTGAACAAAAGTTTCCGGGATTGTGTGTTATTTCCATT | | |
| | CAGTATGTTAAATTTACTAGGGCAGCTAATTTGTCAAAAAGTCTTTTTCAGTATATGTTACAGAATTGGATGGCTGAATTTGAACAGATCCTTCGGGAATTGAG | | |
| | ACTTCAGGTCAACTCCACGCGCTTGGACCTGTCGCTGACCAAAGGATTACCCAATTGGATCTCCTCAGCATTTTCTTTCTTTAAAAAATTGGGTGGGATTAATA | | |
| | TTATTTGGAGATACACTTTGCTGTGGATTAGTGTTGCTTCTTTGATTGGTCTGTAAGCTTAAGGCCCAAACTAGGAGAGACAAGGTGGTTATTGCCCAGGCGC | | |
| | TTGCAGGACTAGAACATGGAGCTTCCCCTGATATATCTATGCTTAGGCAATAGGTCGCTGGCCACTCAGCTCTTATATCTCACGAGGCTAGACTCATTGCACG | | |
| | AGATAGAGTGAGTGTGCTTCAGCAGCCCGAGAGAGTTGCAAGGCTAAGCACTGCAGTAGAAGGGCTCTGCGGCACATATGAGCCTATTCTAGGGAGACATG | | |
| | TCATCTTTCATGAAGGTTCAGTGTCCTAGTTCCCTTCCCCCAGGCAAAACGACACGGGAGCAGGTCAGGGTTGCTCTGGGTAAAAGCCTGTGAGCCTAAGAG | | |
| | CTAATCCTGTACATGGTTCCTTTACCTACACACTGGGGATTTGACCTCTATCTCCACTCTCGTTAATATGGGTGGCCTATTTGCTCTTATTAATAGAAAAGGGGG | | |
| | AACTGTGGGAAGCCGCCCCCACATTCGCCGTCACAAGATGGCGCTGACATCCTGTGTTCTAAGTTGGTAAACAAATAATCTGCGCATGAGCCAAGGGTATTTA | | |
| | CGACTACTTGTACTCTGTTTTTCCCGTGAACGTCAGCTCGGCCATGGGCTGCAGCCAATCAGGGAGTGATGCGTCCGAGGCAATTGTTGTTCTCTTTAAAGAG | | |
| | GAAAGGGGTTTCGTTTTCTCTCTCTCTTGCTTCTTACACTCTGGCCCCATAAGATGTAAGCAATAAAGCTTTGCCGTAGAAGATTCTGGGTGTTGTGTTCTTCCT | | |
| | GGCCGGTCGTGAGAACGCGTCGAATAACA | | |
| IAP- | TGTTGGGAGCCGCGCCCACATTCGCCGTTACAAGATGGCGCTGACAGCTGTGTTCTAAGTGGTAAACAAATAATCTGCGCATGTGCCGAGGGTGGTTCTTCA | 383 | 7126 |
| RP23- | CTCCATGTGCTCTGCCTTCCCCGTGACGTCAACTCGGCCGATGGGCTGCAGCCAATCAGGGAGTGACACGTCCTAGGCGAAGGAGAATTCTCTTTAATAGGG | | |
| 324C9 | ACGGGGTTTCGTTTTCTCTCTCTCTTGCTTCTTGCTCTCTTGCTTCTTGCACTCTGGCTCCTGAAGATGTAAGCAATAAAGCTTTGCCGCAGAAGATTCTGGTCT | | |
| | GTGGTGTTCTTCCTGGCCGGTCGTGAGAACGCGTCTAATAACAATTGGTGCCGAATTCCGGGACGAGAAAAAACTCGGGACTGGCGCAAGGAAGATCCCTC | | |
| | ATTCCAGAACCAGAACTGCGGGTCGCGGTAATAAAGGTTCCCGTAAAGCAGACTGTTAAGAAGGATTCAACTGTATGAATTCAGAACTTTTCAGCTGGGGAA | | |
| | CGAGAGTACCAGTGAGTACAGCTTTACGAGGTAAGTCTGATCTTGAACTTTCTAAGGAAATTCAAGACAGTCTATCAGAAGTAAAGTGGAATATGTTTGGCCT | | |
| | TGAATTTTTTCTGGTGTTAGGAGCCCTTTTGTTCCTTTTCACATGTTATCAAGTGATTAAGATAGGGCTGAAAATTCTAGAGGAAATTCAGGACAAGCTATCAG | | |
| | AAGTAAAGCGGGGAGAGAGAGTAGGAGCAAAGAGAAAATATGGTACACAAAATAAGTATACAGGCCTTTCCAAGGGTCTTGAACCCGAGGAAAAGTTAAG | | |
| | GTTAGGTAGGAATACCTGGAGAGAGATTAGAAGAAAAAGAGGAAAAAGGGAAAAGAAGAAAGATCAATTAGCGGAGGTCTCTAGGAAAAGGAGCCTGTG | | |
| | CTCATCGCTGGATGGGCTCGGGGAGCCAGCTCTTAGTAGCTCTGAAGCAGATGAAGAATTCTCCTCTGAAGAAACAGACTGGGAGGAAGAAGCAGCTCATT | | |
| | ATGAGAAAAAAGGGTACCAGCCAGGTAAAGTGCTAGCTAATCAGTTAAGGAAGCCAAAAGCGGCTGGCGAAGGCCAGTTTGCTGATTGGCCTCAGGGCAG | | |
| | TCGGTTTCAAGGTCCGCCCTATGCGGAGCCCCCGCCCTGCGTAGTGCGTCAGCAATGCGCAGAGAGATGCGCAGAGAGGCAGTGCGCAGAGAGGCAGTGC | | |
| | GCAGACTCATTCATTCCCAGAGAGGAACAAAGGAAAATACAACAGGCATTTCCGGTCTTTGAAGGAGCCGAGGGTGGGCGTGTCCACGCTCCGGTAGAATA | | |
| | CTTACAAATTAAAGAAATTGCCGAGTCGGTCCGTAAATACGGAACCAATGCTAATTTTACCTTGGTGCAGTTAGACAGGCTCGCCGGCATGGCACTAACTCCT | | |
| | GCTGACTGGCAAACGGTTGTAAAAGCCGCTCTCCCTAGTATGGGCAAATATATGGAATGGAGAGCGCTTTGGCACGAAGCTGCACAAGCGCAGGCCCGAGC | | |
| | AAACGCAGCTGCTTTGACTCCAGAGCAGAGAGATTGGACTTTTGACTTGTTAACGGGTCAGGGAGCTTATTCTGCTGATCAGACAAACTACCATTGGGGAGC | | |
| | TTATGCCCAGATTTCTTCCACGGCTATTAGGGCCTGGAAGGCGCTCTCTCGAGCAGGTGAAACCACTGGTCAGTTAACAAAGATAATCCAGGGACCTCAGGA | | |
| | ATCCTTCTCAGATTTTGTGGCCAGAATGACAGAGGCAGCAGAGCGTATTTTTGGAGAGTCAGAGCAAGCTGCGCCTCTGATAGAACAGCTAATCTATGAGCA | | |
| | AGCCACAAAGGAGTGCCGAGCGGCCATAGCCCCAAGAAAGAACAAAGGCTTACAAGACTGGCTCAGGGTCTGTCGAGAGCTTGGGGGACCTCTCACCAATG | | |
| | CAGGCTTAGCGGCCGCCATCCTCCAATCTCAGAACCGCTCCATGGGCAGAAATGATCAGAGGACATGTTTTAATTGCGGAAAGCCTGGGCATTTTAAGAAAG | | |
| | ATTGCAGAGCTCCAGATAAACAGGGAGGGACTCTCACTCTTTGCTCTAAGTGTGGCAAGGGTTATCATAGAGCTGACCAGTGTCGCTCTGTGAGGGATATAA | | |
| | AGGGCAGAGTCCTTCCCCCACCTGATAGTCAATCAACTGATGTGCCAAAAAACGGGTCATCGGGCCCTCGGTCCCAGGGCCCTCAAAGATATGGGAACCGGT | | |
| | TTGTCAGGACCCAGGAAGCAGTCAGAGAGGCGACCCAGGAAGACCCACAAGGGTGGACCTGCGTGCCGCCTCCGACTTCCTATTAATGCCTCAAATGAGTAT | | |
| | TCAGCCGGTGCCAGTGGAGCCTATACCATCCTTGCCCCTGGGAACCATGGGCCTTATTCTCGGCCGGGGTTCACTCACCTTGCAGGGCTTAGTAGTCCACCCT | | |
| | GGAGTTATGGATTGTCAACATTCCCCTGAAATACAGGTCCTGTGCTCAAGCCCTAAAGGCGTTTTTTCTATTAGTAAAGGAGATAGGATAGCTCAGCTGCTGC | | |
| | TCCTCCCTGATAATACCAGGGAGAAATCTGCAGGACCTGAGATAAAGAAAATGGGCTCCTCAGGAAATGATTCTGCCTATTTGGTTGTATCTTTAAATGATAG | | |
| | ACCTAAGCTCCGCCTTAAGATCAACGGAAAAGAGTTTGAAGGCATCCTTGATACCGGAGCAGATAAAAGTATAATTTCTACACATTGGTGGCCCAAAGCATG | | |
| | GCCCACCACAGAGTCATCTCATTCATTACAGGGCCTAGGTTATCAATCATGTCCCACTATAAGCTCCATTGCCTTGACGTGGGAATCCTCTGAAGGGCAGCAA | | |
| | GGGAAATTCATACCTTATGTGCTCCCACTCCCGGTTAACCTCTGGGGAAGGGATATTATGCAGCATTTGGGCCTTATTTTGTCCAATGAAAACGCCCCATCGG | | |
| | GAGGGTATTCAACTAAAGCAAAAAATATCATGGCAAAGATGGGTTATAAAGAAGGAAAAGGGTTAGGACATCAAGAACAGGGAAGGATAGAGCCCATCTC | | |
| | ACCTAATGGAAACCAAGACAGACAGGGTCTGGGTTTTCCTTAGCGGCCATTGGGGCAGCACGACCCATACCATGGAAAACAGGGGACCCAGTGTGGGTTCC | | |
| | TCAATGGCACCTATCCTCTGAAAAACTAGAAGCTGTGATTCAACTGGTAGAGGAACAATTAAAATTAGGCCATATTGAACCCTCTACCTCACCTTGGAATACTC | | |
| | CAATTTTTGTAATTAAGAAAAAGTCAGGAAAGTGGAGACTGCTCCATGACCTCAGAGCCATTAATGAGCAAATGAACTTATTTGGCCCAGTACAGAGGGGTC | | |
| | TCCCTGTACTTTCCGCCTTACCACGTGGCTGGAATTTAATTATTATAGATATTAAAGATTGTTTCTTTTCTATACCTTTGTGTCCAAGGGATAGGCCCAGATTTG | | |
| | CCTTTACCATCCCCTCTATTAATCACATGGAACCTGATAAGAGGTATCAATGGAAGGTCTTACCACAGGGAATGTCCAATAGTCCTACAATGTGCCAACTTTAT | | |
| | GTGCAAGAAGCTCTTTTGCCAGTGAGGGAACAATTCCCCTCTTTAATTTTGCTCCTTTACATGGATGACATCCTCCTGTGCCATAAAGACCTTACCATGCTACAA | | |
| | AAGGCATATCCTTTTCTACTTAAAACTTTAAGTCAGTGGGGTTTACAGATAGCCACAGAAAAGGTCCAAATTTCTGATACAGGACAATTCTTGGGCTCTGTGG | | |
| | TGTCCCCAGATAAGATTGTGCCCCAAAAGGTAGAGATAAGAAGAGATCACCTCCATACCTTAAATGATTTTCAAAAGCTGTTGGGAGATATTAATTGGCTCAG | | |
| | ACCTTTTTTAAAGATTCCTTCCGCTGAGTTAAGGCCTTTGTTTAGTATTTTAGAAGGAGATCCTCATATCTCCTCCCCTAGGACTCTTACTCTAGCTGCTAACCAG | | |
| | GCCTTACAAAAGGTGGAAAAGGCCTTACAGAATGCACAATTACAACGTATTGAGGATTCGCAGCCTTTCAGTTTGTGTGTCTTTAAGACAGCACAATTGCCAA | | |
| | CTGCAGTTTTGTGGCAGAATGGGCCATTGTTGTGGATCCATCCAAACGTATCCCCAGCTAAAATAATAGATTGGTATCCTGATGCAATTGCACAGCTTGCCCTT | | |
| | AAAGGCCTAAAAGCAGCAATCACCCACTTTGGGCAAAGTCCATATCCTTTAATTGTACCTTATACCGCTGCACAGGTTCAAACCTTGGCAGCCACATCTAATGA | | |
| | TTGGGCAGTTTTAGTTACCTCCTTTTCAGGAAAAATAGATAACCATTATCCAAAGCATCCAATCTTACAGTTTGCCCAAAATCAATCTGTTGTGTTTCCACAAAT | | |
| | AACAGTAAGAAACCCACTTAAAAATGGGATTGTGGTATATACTGATGGATCAAAAACTGGCATAGGTGCCTATGTGGCTAATGGTAAAGTGGTATCCAAACA | | |
| | ATATAATGAAAATTCACCTCAAGTGGTAGAATGTTTAGTGGTCTTAGAAGTTTTAAAAACCTTTTTAGAACCCCTTAATATTGTGTCAGATTCCTGTTATGTGGT | | |
| | TAATGCAGTAAATCTTTTAGAAGTGGCTGGAGTGATTAAGCCTTCCAGTAGAGTTGCCAATATTTTTCAGCAGATACAATTAGTTTTGTTATCTAGAAGATCTC | | |
| | CTGTTTATATTACTCATGTTAGAGCCCATTCAGGCCTACCTGGCCCCATGGCTCTGGGAAATGATTTGGCAGATAAGGCCACTAAAGTGGTGGCTGCTGCCCT | | |
| | ATCATCCCCGGTAGAGGCTGCAAAAAATTTTCATAACAATTTTCATGTGACGGCTGAAACATTACGCAGTCGTTTCTCCTTGACAAGAAAAGAAGCCCGTGAC | | |
| | ATTGTTACTCAATGTCAAAGCTGCTGTGAGTTCTTGCCAGTTCCTCATGTGGGAATTAACCCACGCGGTATTCGACCTCTACAGGTCTGGCAAATGGATGTTAC | | |
| | ACATGTTTCTTCCTTTGGAAAACTTCAATATCTCCATGTGTCCATTGACACATGTTCTGGCATCATGTTTGCTTCTCCGTTAACCGGAGAAAAAGCCTCACATGT | | |
| | GATTCAACATTGCCTTGAGGCATGGAGTGCTTGGGGGAAACCCAGACTCCTTAAGACTGATAATGGACCAGCTTATACGTCTCAAAAATTCCAACAGTTCTGC | | |
| | CGTCAGATGGACGTGACCCACCTGACTGGACTTCCATACAACCCTCAAGGACAGGGTATTGTTGAGCGTGCGCATCGCACCCTCAAAACCTATCTTATAAAAC | | |
| | AGAAGAGGGGAACTTTTGAGGAGACTGTACCCCGAGCACCAAGAGTGTCTGTGTCTTTGGCACTCTTTACACTCAATTTTTTAAATATTGATGCTCATGGCCA | | |
| | TACTGCGGCTGAACGTCATTGTACAGAGCCAGATAGGCCCAATGAGATGGTTAAATGGAAAAATGTCCTTGATAATAAATGGTATGGCCCGGATCCTATTTT | | |
| | GATAAGATCCAGGGGAGCTATCTGTGTTTTCCCACAGAATGAAGACAACCCATTTTGGGTACCAGAAAGACTCACCCGAAAAATCCAGACTGACCAAGGGAA | | |
| | TACTAATGTCCCTCGTCTTGGTGATGTCCAGGGCGTTAATAATAAAGAGAGAGCAGCGTTGGGGGATAATGTCGACATTTCCACTCCCAATGACGGTGATGT | | |
| | ATAATGCTCAAGTATTCTCCTGCTTTTTTACCACTAACTGGGAACTGGGTTTGGCCTTGATTCAGACAGCCTTGGCTCTGTCTGGACAGGTCCAGACGACTGAC | | |
| | ACCATTAACACTTTGTCAGCCTCAGTGACTACAGTCATAGATAAACAGGCCTCAGCTAATGTCAAGATACAGAGAGGTCTCATGCTGGTTAATCAACTCATAG | | |
| | ATCTTGTCCAGATACAACTAGATGTATTATGACAAATAACTCAGCTGGGATGTGAACAAAAGTTTCCGGAATTGTGTGTTATTTCCATTCAGTATGTTAAATTT | | |
| | ACTAGGGCAGCTAATTTGTCAAAAAGTCTTTTTCAGTATATGTTACAGAATTGGATGGCTGAATTTGAACAGATCCTTCGGGAATTGAGACTTCAGGTCAACT | | |
| | CCACGCGCTTGGACCTGTCGCTGACCAAAGGATTACCCAATTGGATCTCCTCAGCATTTTCCTTCTTTAAAAAATGGGTGGGATTAATATTATTTGGAGATACA | | |
| | CTTTGCTGTGGATTAGTGTTGCTTCTTTGATTGGTCTGTAAGCTTAAGGCCCAAACTAGGAGAGACAAGGTGGTTATTGCCCAGGCGCTTGCAGGACTAGAAC | | |
| | ATGGAGCTCCCCCTGATATATGGTTATCTATGCTTAGGCAATAGGTCGCTGGCCACTCAGCTCTTATATCCCACGAGGCTAGTCTCATTGCACGGGATAGAGT | | |
| | GAGTGTGCTTCAGCAGCCCGAGAGAGTTGCACGGCTAAGCACTGCAATGGAAAGGCTCTGCGGCATATATGAGCCTATTCTAGGGAGACATGTCATCTTTCA | | |
| | TGAAGGTTCAGTGTCCTAGTTCCCTTCCCCCAGGCAAAACGACACGGGAGCAGGTCAGGGTTGCTCTGGGTAAAAGCCTGTGAGCCTAAGAGCTAATCCTGT | | |
| | ACATGGCTCCTTTACCTACACACTGGGGATTTGACCTCTATCTCCACTCTCATTAATATGGGTGGCCTATTTGCTCTTATTAAAAGAAAAGGGGGAGATGTTGG | | |
| | GAGCCGCGCCCACATTCGCCGTTACAAGATGGCGCTGACAGCTGTGTTCTAAGTGGTAAACAAATAATCTGCGCATGTGCCGAGGGTGGTTCTTCACTCCAT | | |
| | GTGCTCTGCCTTCCCCGTGACGTCAACTCGGCCGATGGGCTGCAGCCAATCAGGGAGTGACACGTCCTAGGCGAAGGAGAATTCTCTTTAATAGGGACGGG | | |
| | GTTTCGTTTTCTCTCTCTCTTGCTTCTCGCTCGCTCTTGCTTCTTGCACTCTGGCTCCTGAAGATGTAAGCAATAAAGTTTTGCCGCAGAAGATTCTGGTCTGTG | | |
| | GTGTTCTTCCTGGCCGGTCGTGAGAACGCGTCTAATAACA | | |
| IAP- | TGTGGGAAGCCGCCCCCACATTCGCCGTCACAAGATGGCGCTGACATCCTGTGTTCTAAGTTGGTAAACAAATAATCTGCGCATGAGCCAAGGGTATTTACG | 384 | 7155 |
| RP23- | ACTACTTGTACTCTGTTTTTCCCGTGAACGTCAGCTCGGCCATGGGCTGCAGCCAATCAGGGAGTGATGCGTCCTAGGCAATTGTTGTTCTCTTTAAAGAGGG | | |
| 440N1 | AAGGGGGTTTCGTTTTCTCTCTCTCTTGCTTCGCTCTCTCTTGCTTCTTACACTCTGGCCCCATAAGATGTAAGCAATAAAGCTTTGCCGTAGAAGATTCTGGTT | | |
| | GTTGTGTTCTTCCTGGCCGGTCGTGAGAACGCGTCGAATAACAATTGGTGCCGAAACCCGGGACGAGAAAAAACTCCGGACTGGCGCAGGAGGGATACTTC | | |
| | ATTTCAGAACCAGAACTGCGGATCACGTTTATAAAGGTTCCCGTAACACAGACTGTTGAGAAGGATTCAACTGCCGAATTCAGAACTCATCAGCTGGGGAAC | | |
| | GACGGTGATAAAGGTTCCCGTAAAGCAGACTGTTAAGAAGGATTCAACTGTATGAATTCAGAACTTTTCAGCTGGGGAACGAGAGTACCAGTGAGTATGTTT | | |
| | GGCCTTGAATTTTTTCTGGTGTTAGGAGCCCTTTTGTTCTTTTTCACATGTTATCAAGTGATTAAGATAGGGCTGAAAATTCTAGAGGAAATTCAGGACAAGCT | | |
| | ATCAGAAGTAAAGCGGGAAGAAAGAGTAGGAACAAAGAGGAAGTATGGTACACAAAATAAGTATACAGGCCTTTCCAAGGGTCTTGAACCCGAGGAAAAG | | |
| | TTAAGGTTAGGTAGGAATACCTGGAGAGAGATTAGAAGAAAAAGAGGAAAAAGGGAGAAGAAAAAAGATCGATTAGCGGAGGTCTCTAGGAGATACTCGT | | |
| | CACTAGATGAGCTCAGGAAGCCAGCTCTTAGTAGCTCTGAAGCAAGTGAAGAATCCTCCTCTGAGGAAACAGACTGGGAGGAAGAAGCAGCCCATTACCAG | | |
| | CCAGCTAATTGGTCAAGAAAAAAGCCAAAAGCGGCTGGCGAAAGTCAGCGTACTGTTCAACCTCCCGGCAGTCGGTTTCAAGGTCCGCCCTATGCGGAGCCC | | |
| | CCGCCCTGCGTAGTGCGTCAGCAATGCGCAGAGAGGCAGTGCGCAGAGAGATGCGCAGAGAGGCAGTGCGCAGAGAGATGCGCAGAGAGGCAGTGCGCA | | |
| | GAGAGGCAGTGCGCAGAGAGGCAGTGCGCAGACTCATTCATTCCCCGAGAGGAACAAAAGAAAATACAACAGGCATTTCCAGTCTTTGAAGGAGCCGAGG | | |
| | GTGGGCGTGTCCACGCTCCGGTAGAATACGTACAGATTAAGGAAATTGCCGAGTCGGTTCGTAAATACGGAACCAATGCTAATTTTACCTTGGCGCAGTTAG | | |
| | ACAGGCTCGCTGGCATGGCACTAACTCCTGCCGACTGGCAAACGGTTGTAAAAGCCGCTCTCCCTAGTATGGGCAAATATATGGAATGGAAAGCGCTTTGGC | | |
| | ACGAAGCTGCACAGGCGCAGGCCCGAGCAAACGCAGCTGCTTTGACTCCAGAGCAGAGAGATTGGACTTTTGACTTGTTAACGGGTCAGGGAGCTTATTCT | | |
| | GCTGATCAGACAAACTACCATTGGGGAGCTTATGCCCAGATTTCTTCCACGGCTATTAGGGCCTGGAAGGCGCTCTCTCGAGCAGGTGAAACCACTGGTCAG | | |
| | TTAACAAAGATAATCCAGGGACCTCAGGAATCTTTCTCAGATTTTGTGGCCAGAATGACAGAGGCAGCAGAGCGTATTTTTGGAGAGTCAGAGCAAGCTGCG | | |
| | CCTCTCATAGAACAGCTAATCTACGAGCAAGCCACAAAGGAGTGCCGAGCGGCCATAGCCCCAAGAAAGAACAAAGGCTTACAAGACTGGCTCAGGGTCTG | | |
| | TCGAGAGCTTGGGGGACCTCTCAGCAATGCAGGTTTAGCGGCTGCCATCCTTCAATCTCAGAACCGCTCCATGAGCAGAAATAATCAGAGGACATGTTTTAAT | | |
| | TGCGGAAAGCCTGGGCATTTTAAGAAAGATTGCAGAGCTCCAGATAAACAGGGAGGGACTCTCACTCTTTGCTCTAAGTGTGGCAAGGGTTATCATAGAGCT | | |
| | GACCAGTGTCGCTCTGTGAGGGATATAAAGGGCAGAATTCTTCCCCCACCTGATAGTCAATCAACTGATGTGCCAAAAAACGGGTCATCGGGCCCTCGGTCC | | |
| | CAGGGCCCTCAAAGATATGGGAACCGGTTTGTCAGGACCCAGGAAGCAGTCAGAGAGACGACCCAGGAAGACCCACAAGGGTGGACCTGCGTGCCGCCTC | | |
| | CGACTTCCTATTAATGCCTCAAATGAGTATTCAGCCGGTGCCGGTGGAGCCTATACCATCCTTGCCCCCGGGAACCATGGGCCTTATTCTCGGCCGAGGTTCA | | |
| | CTCACCTTGCAGGGCTTAGTAGTCCACCCTGGAGTTATGGATTGTCAACATTCCCCTGAAATACAGGTCCTGTGCTCAAGCCCTAAAGGCGTTTTTTCTATTAG | | |
| | TAAAGGAGATAGGATAGCTCAGCTGCTGCTCCTCCCTGATAATACCAGGGAGAAATCTGCAGGACCTGAGATAAAGAAAATGGGCTCCTCAGGAAATGATTC | | |
| | TGCCTATTTGGTTGTATCTTTAAATGATAGACCTAAGCTCCGCCTTAAGATTAATGGAAAAGAGTTTGAAGGCATCCTTGATACCGGAGCAGATAAAAGTATA | | |
| | ATTTCTACACATTGGTGGCCCAAAGCATGGCCCACCACAGAGTCATCTCATTCATTACAGGGCCTAGGATATCAATCATGTCCCACTATAAGCTCCGTTGCCTT | | |
| | GACGTGGGAATCCTCTGAAGGGCAGCAAGGGAAATTCATACCTTATGTGCTCCCACTCCCGGTTAACCTCTGGGGAAGGGATATTATGCAGCATTTGGGCCT | | |
| | TATTTTGTCCAATGAAAACGCCCCATCAGGAGGGTATTCAGCTAAAGCAAAAAATATCATGGCGAAGATGGGTTATAAAGAAGGAAAAGGGTTAGGACATC | | |
| | AAGAACAGGGAAGGATAGAGCCCATCTCACCTAATGGAAACCAAGACAGACAGGGTCTGGGTTTTCCTTAGCGGCCATTGGGGCAGCACGACCCATACCAT | | |
| | GGAAAACAGGGGACCCAGTGTGGGTTCCTCAATGGCACCTATCCTCTGAAAAACTAGAAGCTGTGATTCAACTGGTAGAGGAACAATTAAAACTAGGCCATA | | |
| | TTGAACCCTCTACCTCACCTTGGAATACTCCAATTTTTGTAATTAAGAAAAAGTCAGGAAAGTGGAGACTGCTCCATGACCTCAGAGCCATTAATGAGCAAAT | | |
| | GAACTTATTTGGCCCAGTACAGAGGGGTCTCCCTGTACTTTCCGCCTTACCACGTGGCTGGAATTTAATTATTATAGATATTAAAGATTGTTTCTTTTCTATACC | | |
| | TTTGTGTCCAAGGGATAGGCCCAGATTTGCCTTTACCATCCCCTCTATTAATCACATGGAACCTGATAAGAGGTATCAATGGAAGGTCTTACCACAGGGAATG | | |
| | TCCAATAGTCCTACTATGTGTCAACTTTATGTACAAGAAGCTCTTTTGCCAGTGAGGGAACAATTCCCCTCTTTAATTTTGCTCCTTTACATGGATGACATCCTC | | |
| | CTGTGCCATAAAGACCTTACCATGCTACAAAAGGCATATCCTTTTCTACTTAAAACTTTAAGTCAGTGGGGTCTACAGATAGCCACAGAAAAGGTCCAAATTTC | | |
| | TGATACAGGACAATTCTTGGGCTCTGTGGTGTCCCCAGATAAGATTGTGCCCCAAAAGGTAGAGATAAGAAGAGATCACCTCCATACCTTAAATGATTTTCAA | | |
| | AAGCTGTTGGGAGATATTAATTGGCTCAGACCTTTTTTAAAGATTCCTTCCGCTGAGTTAAGGCCTTTGTTTAGTATTTTAGAAGGAGATCCTCATATCTCCTCC | | |
| | CCTAGGACTCTTACTCTAGCTGCTAACCAGGCCTTACAAAAAGTGGAAAAGGCCTTACAGAATGCACAATTACAACGTATTGAGGATTCGCAGCCTTTCAGTT | | |
| | TGTGTGTCTTTAAGACAGCACAATTGCCAACTGCAGTTTTGTGGCAGAATGGGCCATTGTTGTGGATCCATCCAAACGTATCCCCAGCTAAAATAATAGATTG | | |
| | GTATCCTGATGCAATTGCACAGCTTGCCCTTAAAGGCCTAAAAGCAGCAATCACTCACTTTGGGCAAAGTCCATATCTTTTAATTGTACCTTATACCGCTGCAC | | |
| | AGGTTCAAACCTTGGCAGCCGCATCTAATGATTGGGCAGTTTTAGTTACCTCCTTTTCAGGAAAAATAGATAACCATTATCCAAAACATCCAATCTTACAGTTT | | |
| | GCCCAAAATCAATCTGTTGTGTTTCCACAAATAACAGTAAGAAACCCACTTAAAAATGGGATTGTGGTATATACTGATGGATCAAAAACTGGCATAGGTGCCT | | |
| | ATGTGGCTAATGGTAAAGTGGTATCCAAACAATATAATGAAAATTCACCTCAAGTGGTAGAATGTTTAGTGGTCTTAGAAGTTTTAAAAACCTTTTTAGAACC | | |
| | CCTTAATATTGTGTCAGATTCCTGTTATGTGGTAAATGCAGTAAATCTTTTAGAAGTGGCTGGAGTGATTAAGCCTTCCAGTAGAGTTGCCAATATTTTTCAGC | | |
| | AGATACAATTAGTTTTGTTATCTAGAAGATCTCCTGTTTATATTACTCATGTTAGAGCCCATTCAGGCCTACCTGGCCCCATGGCTCTGGGAAATGATTTGGCA | | |
| | GATAAGGCCACTAAAGTGGTGGCTGCTGCCCTATCATCCCCGGTAGAGGCTGCAAGAAATTTTCATAATAATTTTCATGTGACGGCTGAAACATTACGCAGTC | | |
| | GTTTCTCCTTGACAAGAAAAGAAGCCCGTGACATTGTTACTCAATGTCAAAGCTGCTGTGAGTTCTTGCCAGTTCCTCATGTGGGAATTAACCCACGCGGTATT | | |
| | CGACCTCTACAGGTCTGGCAAATGGATGTTACACATGTTTCTTCCTTTGGAAAACTTCAATATCTCCATGTGTCCATTGACACATGTTCTGGCATCATGTTTGCC | | |
| | TCTCCGTTAACCGGAGAAAAAGCCTCACATGTGATTCAACATTGTCTTGAGGCATGGAGTGCTTGGGGGAAACCCAGACTCCTTAAGACTGATAATGGACCA | | |
| | GCTTATACGTCCCAAAAATTTCAGCAGTTCTGCCGTCAGATGGACGTAACCCACCTGACTGGACTTCCATACAACCCTCAAGGACAGGGTATTGTTGAGCGTG | | |
| | CGCATCGCACCCTCAAAGCCTATCTTATAAAACAGAAGAGGGGAACTTTTGAGGAGACTGTACCCCGAGCACCAAGAGTGTCGGTGTCTTTGGCACTCTTTAC | | |
| | ACTCAATTTTTTAAATATTGATGCTCATGGCCATACTGCGGCTGAACGTCATTGTTCAGAGCCAGATAGGCCCAATGAGATGGTTAAATGGAAAAATGTTCTT | | |
| | GATAATAAATGGTATGGCCCGGATCCTATCTTGATAAGATCCAGGGGAGCTATCTGTGTTTTCCCACAGAATGAAGACAACCCATTTTGGGTACCAGAAAGAC | | |
| | TCACCCGAAAAATCCAGACTGACCAAGGGAATACTAATGTCCCTCGTCTTGGTGATGTCCAGGGCGTCAATAATAAAGAGAGAGCAGCGTTGGGGGATAAT | | |
| | GTCGACATTTCCACTCCCAATGACGGTGATGTATAATGCTCAAGTATTCTCTTGCTTTTTTACCACTAACTGGGAACTGGGTTTGGCCTTAATTCAGACAGCCTT | | |
| | GGTTCTGTCTGGACAGGTCCAGATGACTGACACCATTAACACTTTGTCAGCCTCAGTGACTACAGTCATAGATGAACAGGCCTCAGCTAATGTCAAGATACAG | | |
| | AGAGGTCTCATGCTGGTTAATCAACTCATAGATCTTGTCCAGAAACAACTGGATGTATTATGACAAATAACTCAGCAGGGATGTGAACAAAAGTTTCCGGGAT | | |
| | TGTGTGTTATTTCCATTCAGTATGTTAAATTTACTAGGACAGCTAATTTGTCAAAAAGTCTTTTTCAGTATATGTTACAGAATTGGATGGCTGAATTTGAACAGA | | |
| | TCCTTCGAGAATTGAGACTTCAGGTCAACTCCACGCGCTTGGACCTGTCTCTGACCAAAGGATTACCCAATTGGATCTCCTCAGCATTTTCTTTCTTTAAAAAAT | | |
| | TGGGTGGGATTAATATTATTTGGAGATACACTTTGCTGTGGATTAGTGTTGCTTCTTTGATTGGTCTGTAAGCTTAAGGCCCAAACTAGGAGAGACAAGGTGG | | |
| | TTATTGCCCAGGCGCTTGCAGGACTAGAACATGGAGCTTCCCCTGATATATGGTTATCTATGCTTAGGCAATAGGTCGCTGGCCACTCAGCTCTTATATCTCAC | | |
| | GAGGCTAGACTCATTGCACGAGATAGAGTGAGTGTGCTTCAGCAGCCCGAGAGAGTTGCAAGGCTAAGCACTGCAGTAGAAGGGCTCTGCGGCACATATGA | | |
| | GCCTATTCTAGGGAGACATGTCATCTTTCAAGAAGGTTCAGTGTCCTAGTTCCCTTCCCCCAGGCAAAACGACACGGGAGCAGGTCAGGGTTGCTCTGGGTA | | |
| | AAAGCCTGTGAGCCTAAGAGCTAATCCTGTACATGGCTCCTTTACCTACACACTGGGGATTTGACCTCTATCTCCACTCTCATTAATATGGGTGGCCTATTTGCT | | |
| | CTTATTAATAGAAAAGGGGGAACTGTGGGAAGCCGCCCCCACATTCGCCGTCACAAGATGGCGCTGACATCCTGTGTTCTAAGTTGGTAAACAAATAATCTG | | |
| | CGCATGAGCCAAGGGTATTTACGACTACTTGTACTCTGTTTTTCCCGTGAACGTCAGCTCGGCCATGGGCTGCAGCCAATCAGGGAGTGATGCGTCCTAGGCA | | |
| | ATTGTTGTTCTCTTTAAAGAGGGAAGGGGGTTTCGTTTTCTCTCTCTCTTGCTTCGCTCTCTCTTGCTTCTTACACTCTGGCCCCATAAGATGTAAGCAATAAAG | | |
| | CTTTGCCGTAGAAGATTCTGGTTGTTGTGTTCTTCCTGGCCGGTCGTGAGAACGCGTCGAATAACA | | |
| IAP- | TGTTGGGAGCCGCGCCCACATTCGCCGTTACAAGATGGCGCTGACAGCTGTGTTCTAAGTGGTAAACAAATAATCTGCGCATGTGCCGAGGGTGGTTCTTCA | 385 | 7084 |
| RP23- | CTCTATGTGCTCTGCCTTCCCCGTGACGTCAACTCGGCCGATGGGCTGCAGCCAATCAGGGAGTGACACGTCCTAGGCGAAGGAGAATTCTCTTTAATAGGG | | |
| 92L23 | ACGGGGTTTCGTTTTCTCTCTCTCTTGCTTCTCGCTCGCTCTTGCTTCTTGCACTCTGGCTCCTGAAGATGTAAGCAATAAAGTTTTGCCGCAGAAGATTCTGGT | | |
| | CTGTGGTGTTCTTCCTGGCCGGGCGTGAGAACGCGTCTAATAACAATTGGTGCCGAATTCCGGGACGAGAAAAAAACTCGGGACTGGCGCAAGGAAGATCC | | |
| | CTCATTCCAGAACCAGAACTGCGGGTCGCGGTAATAAAGGTTCCCGTAAAGCAGACTGTTAAGAAGGATTCAACTGTATGAATTCAGAACTTTTCAGCTGGG | | |
| | GAACGAGAGTACCAGTGAGTACAGCTTTACGAGGTAAGTCTGATCTTGAACTTTCTAAGGAAATTCAAGACAGTCTATCAGAAGTAAAGTGGAATATGTTTG | | |
| | GCCTTGAATTTTTTCTGGTGTTAGGAGCCCTTTTGTTCCTTTTCACATGTTATCAAGTGATTAAGATAGGGCTGAAAATTCTAGAGGAAATTCAGGACAAGCTA | | |
| | TCAGAAGTAAAGCGGGGAGAGAGAGTAGGAGCAAAGAGAAAATATGGTACACAAAATAAGTATACAGGCCTTTCCAAGGGTCTTGAACCCGAGGAAAAGT | | |
| | TAAGGTTAGGTAGGAATACCTGGAGAGAGATTAGAAGAAAAAGAGGAAAAAGGGAAAAGAAGAAAGATCAATTAGCGGAGGTCTCTAGGAGATACTCGTC | | |
| | ACTAGATGAGCTCAGGAAGCCAGCTCTTAGTAGTTCTGAAGCAGATGAAGAATTCTCCTCTGAGGAAACAGACTGGGAGGAAGAAGCAGCCCATTACCAGC | | |
| | CAGCTAATTGGTCAAGAAAAAAGCCAAAAGCGGCTGGCGAAGGCCAGTTTGCTGATTGGCCTCAGGGCAGTCGGCTTCAAGGTCCGCCCTATGCGGAGTCC | | |
| | CCGCCCTGCGTAGTGCGTCAGCAATGCGCAGAGAGGCAGTGCGCAGAGAGGCAGTGCGCAGACTCATTCATTCCCAGAGAGGAACAAAGGAAAATACAAC | | |
| | AGGCATTTCCGGTCTTTGAAGGAGCCGAGGGTGGGCGTGTCCACGCTCCGGTAGAATACTTACAAATTAAAGAAATTGCCGAGTCGGTCCGTAAATATGGAA | | |
| | CCAATGCTAATTTTACCTTGGTGCAGTTAGACAGGCTCGCCGGCATGGCACTAACTCCTGCTGACTGGCAAACGGTTGTAAAAGCCGCTCTCCCTAGTATGGG | | |
| | CAAATATATGGAATGGAGAGCGCTTTGGCACGAAGCTGCACAAGCGCAGGCCCGAGCAAACGCAGCTGCTTTGACTCCAGAGCAGAGAGATTGGACTTTTG | | |
| | ACTTGTTAACGGGTCAGGGAGCTTATTCTGCTGATCAGACAAACTACCATTGGGGAGCTTATGCCCAGATTTCTTCCACGGCTATTAGGGCCTGGAAGGCGCT | | |
| | CTCTCGAGCAGGTGAAACCACTGGTCAGTTAACAAAGATAATCCAGGGACCTCAGGAATCCTTCTCAGATTTTGTGGCCAGAATGACAGAGGCAGCAGAGCG | | |
| | TATTTTTGGAGAGTCAGAGCAAGCTGCGCCTCTGATAGAACAGCTAATCTATGAGCAAGCCACAAAGGAGTGCCGAGCGGCCATAGCCCCAAGAAAGAACA | | |
| | AAGGCTTACAAGACTGGCTCAGGGTCTGTCGAGAGCTTGGGGGACCTCTCAGCAATGCAGGTTTAGCGGCTGCCATCCTTCAATCCCAAAACCGCTCCATGG | | |
| | GCAGAAATAATCAGAGGACATGTTTTAACTGCGGAAAGCCTGGGCATTTTAAGAAAGATTGCAGAGCTCCAGATAAACAGGGAGGGACTCTCACTCTTTGCT | | |
| | CTAAGTGTGGCAAGGGTTATCATAGAGCTGACCAGTGTCGCTCTGTGAGGGATATAAAGGGCAGAGTCCTTCCCCCACCTGATAGTCAATCAGCTGATGTGC | | |
| | CAAAAAACGGGTCATCGGGCCCTCGGTCCCAGGGCCCTCAAAGATATGGGAACCGGTTTGTCAGGACCCAGGAAGCAGTCAGAGAGGCGACCCAGGAAGA | | |
| | CCCACAAGGGTGGACCTGCGTGCCGCCTCCGACTTCCTACTAATGCCTCAAATGAGTATTCAGCCGGTGCCGGTGGAGCCTATACCATCCTTGCCCCCGGGAA | | |
| | CCATGGGCCTTATTCTCGGCCGGGGTTCACTCACCTTGCAGGGCTTAGTAGTCCACCCTGGAGTTATGGATTGTCAACATTCCCCTGAAATACAGGTCCTGTGC | | |
| | TCAAGCCCTAAAGGCGTTTTTTCTATTAGTAAAGGAGATAGGATAGCTCAGCTGCTGCTCCTCCCTGATAATACCAGGGAGAAATTTGCAGGACCTGAGATAA | | |
| | AGAAAATGGGCTCCTCAGGAAATGATTCTGCCTATTTGGTTGTATCTTTAAATGATAGACCTAAGCTCCGCCTTAAGATTAACGGAAAAGAGTTTGAAGGCAT | | |
| | CCTTGATACCGGAGCAGATAAAAGTATAATTTCTACACATTGGTGGCCCAAAGCATGGCCCACCACAGAGTCATCTCATTCATTACAGGGCCTAGGATATCAA | | |
| | TCATGTCCCACTATAAGCTCCATTGCCTTGACGTGGGAATCCTCTGAAGGACAGCAAGGGAAATTCATACCTTATGTGCTCCCACTCCCGGTTAACCTCTGGG | | |
| | GAAGGGATATTATGCAGCATTTGGGCCTTATTTTGTCCAATGAAAACGCCCCATCAGGAGGGTATTCAGCTAAAGCAAAAAATATCATGGCAAAGATGGGTT | | |
| | ATAAAGAAGGAAAAGGGTTAGGACATCAAGAACAGGGAAGGATAGAGCCCATCTCACCTAATGGAAACCAAGACAGACAGGGTCTGGGTTTTCCTTAGCG | | |
| | GCCATTGGGGCAGCACGACCCATACCATGGAAAACAGGGGACCCAGTGTGGGTTCCTCAATGGCACCTATCCTCTGAAAAACTAGAAGCTGTGATTCAACTG | | |
| | GTAGAGGAACAATTAAAACTAGGCCATATTGAACCCTCTACCTCACCTTGGAATACTCCAATTTTTGTAATTAAGAAAAAGTCAGGAAAGTGGAGACTGCTCC | | |
| | ATGACCTCAGAGCCATTAATGAGCAAATGAACTTATTTGGCCCAGTACAGAGGGGTCTCCCTGTACTTTCCGCCTTACCACGTGGCTGGAATTTAATTATTATA | | |
| | GATATTAAAGATTGTTTCTTTTCTATACCTTTGTGTCCAAGGGATAGGCCCAGATTTGCCTTTACCATCCCCTCTATTAATCACATGGAACCTGATAAGAGGTAT | | |
| | CAATGGAAGGTCTTACCACAGGGAATGTCCAATAGTCCTACAATGTGCCAACTTTATGTGCAAGAAGCTCTTTTGCCAGTGAGGGAACAATTCCCCTCTTTAA | | |
| | TTTTGCTCCTTTACATGGATGACATCCTCCTGTGCCATAAAGACCTTACCATGCTACAAAAGGCATATCCTTTTCTACTTAAAACTTTAAGTCAGTGGGGTTTAC | | |
| | AGATAGCCACAGAAAAGGTCCAAATTTCTGATACAGGACAATTCTTGGGCTCTGTGGTGTCCCCAGATAAGATTGTGCCCCAAAAGGTAGAGATAAGAAGAG | | |
| | ATCACCTCCATACCTTAAATGATTTTCAAAAGCTGTTGGGAGATATTAATTGGCTCAGACCTTTTTTAAAGATTCCTTCCGCTGAGTTAAGGCCTTTGTTTAGTA | | |
| | TTTTAGAAGGAGATCCTCATATCTCCTCCCCTAGGACTCTTACTCTAGCTGCTAACCAGGCCTTACAAAAGGTGGAAAAAGCCTTACAGAATGCACAATTACAA | | |
| | CGTATTGAGGATTCGCAGCCTTTCAGTTTGTGTGTCTTTAAGACAGCACAATTGCCAACTGCAGTTTTGTGGCAGAATGGGCCATTGTTGTGGATCCATCCAA | | |
| | ACGTATCCCCAGCTAAAATAATAGATTGGTATCCTGATGCAATTGCACAGCTTGCCCTTAAAGGTCTAAAAGCAGCAATCACCCACTTTGGGCAAAGTCCATA | | |
| | TCTTTTAATTGTACCTTATACCGCTGCACAGGTTCAAACCTTGGCAGCCACATCTAATGATTGGGCAGTTTTAGTTACCTCCTTTTCAGGAAAAATAGATAACCA | | |
| | TTATCCAAAACATCCAATCTTACAGTTTGCCCAAAATCAATCTGTTGTGTTTCCACAAATAACAGTAAGAAACCCACTTAAAAATGGGATTGTGGTATATACTG | | |
| | ATGGATCAAAAACTGGCATAGGTGCCTATGTGGCTAATGGTAAAGTGGTATCCAAACAATATAATGAAAATTCACCTCAAGTGGTAGAATGTTTAGTGGTCTT | | |
| | AGAAGTTTTAAAAACCTTTTTAGAACCCCTTAATATTGTGTCAGATTCCTGTTATGTGGTTAATGCAGTAAATCTTTTAGAAGTGGCTGGAGTGATTAAGCCTT | | |
| | CCAGTAGAGTTGCCAATATTTTTCAGCAGATACAATTAGTTTTGTTATCTAGAAGATTTCCTGTTTATATTACTCATGTTAGAGCCCATTCAGGCCTACCTGGCC | | |
| | CCATGGCTCTGGGAAATAATTTGGCAGATAAGGCCACTAAAGTGGTGGCTGCTGCCCTATCATCCCCGGTAGAGGCTGCAAGAAATTTTCATAACAATTTTCA | | |
| | TGTGACGGCTGAAACATTACGCAGTCGTTTCTCCTTGACAAGAAAAGAAGCCCGTGACATTGTTACTCAATGTCAAAGCTGCTGTGAGTTCTTGCCAGTTCCTC | | |
| | ATGTGGGAATTAACCCACGCGGTATTCGACCTCTACAGGTCTGGCAAATGGATGTTACACATGTTTCTTCCTTTGGAAAACTTCAATATCTCCATGTGTCCATT | | |
| | GACACATGTTCTGGCATCATGTTTGCTTCTCCATTAACCGGAGAAAAAGCCTCACATGTGATTCAACATTGCCTTGAGGCATGGAGTGCTTGGGGGAAACCCA | | |
| | GACTCCTTAAGACTGATAATGGACCAGCTTATACGTCTCAAAAATTCCAACAGTTCTGCCGTCAGATGGACGTGACCCACCTGACTGGACTTCCATACAACCCT | | |
| | CAAGGACAGGGTATTGTTGAGCGTGCGCATCGCACCCTCAAAACCTATCTTATAAAACAGAAGAGGGGAACTTTTGAGGAGACTGTACCCCGAGCACCAAG | | |
| | AGTGTCGGTGTCTATGGCACTCTTTACACTCAATTTTTTAAATATTGATGCTCATGGCCATACTGCGGCTGAACGTCATTGTACAGAGCCAGATAGGCCCAATG | | |
| | AGATGGTTAAATGGAAAAATGTCCTTGATAATAAATGGTATGGCCCGGATCCTATTTTGATAAGATCCAGGGGAGCTATCTGTGTTTTCCCACAGAATGAAAA | | |
| | CAACCCATTTTGGATACCAGAAAGACTCACCCGAAAAATCCAGACTGACCAAGGAAATACTAATGTCCCTCGTCTTGGTGATGTCCAGGGCGTCAATAATAAA | | |
| | AAGAGAGCAGCGTTGGGGGATAATGTCGACATTTCCACTCCCAATGACGGTGATGTATAATGCTCAAGTATTCTCCTGCTTTTTTACCACTAACTAGGAACTG | | |
| | GGTTTGGCCTTAATTCAGACAGCCTTGGCTCTGTCTGGACAGGTCCAGACAACTGACACCATTAACACTTTGTCAGCCTCAGTGACTACAGTCATAGATGAAC | | |
| | AGGCCTCAGCTAATGTCAAGATACAGAGAGGTCTCATGCTGGTTAATCAACTCATAGATCTTGTCCAGATACAACTAGATGTATTATGACAATTAACTCAGCT | | |
| | GGGATGTGAACAAAAGTTTCCGGGATTGTGTGTTATTTCCATTCAGTATGTTAAATTTACTAGGACAGCTAATTTGTCAAAAAGTCTTTTTCAGTATATGTTAC | | |
| | AGAATTGGATGGCTGAATTTGAACAGATCCTTCGGGAATTGAGACTTCAGGTCAACTCCACGCGCTTGGACCTGTCGCTGACCAAAGGATTACCCAATTGGA | | |
| | TCTCCTCAGCATTTTCCTTCTTTAAAAAATGGGTGGGATTAATATTATTTGGAGATACACTTTGCTGTGGATTAGTGTTGCTTCTTTGATTGGTCTGTAAGCTTA | | |
| | AGGCCTAAACTAGGAGAGACAAGGTGGTTATTGCCCAGGCGCTTGCAGGACTAGAACATGGAGCTCCCCCTGATATATGGTTATCTATGCTTAGGCAATAGG | | |
| | TCGCTGGCCACTCAGCTCTTACATCTCACGAGGCTAGACTCATTGCACGGGATGGAGTGAGTGTGCTTCAGCAGCCCGAGAGAGTTGCACGGCTAAGCACTG | | |
| | CAATGGAAAGGCTCTGCGGCATATATGAGCCTATTCTAGGGAGACATGTCATCTTTCATGAAGGTTCAGTGTCCTAGTTCCCTTCCCCCAGGCAAAACGACAC | | |
| | GGGAGCAGGTCAGGGTTGCTCTGGGTAAAAGCCTGTGAGCCTAAGAGCTAATCCTGTACATGGCTCCTTTACCTACACACTGGGGATTTGACCTCTATCTCCA | | |
| | CTCTCATTAATATGGGTGGCCTATTTGCTCTTATTAAAAGAAAAGGGGGAGATGTTGGGAGCCGCGCCCACATTCGCCGTTACAAGATGGCGCTGACAGCTG | | |
| | TGTTCTAAGTGGTAAACAAATAATCTGCGCATGTGCCGAGGGTGGTTCTTCACTCTATGTGCTCTGCCTTCCCCGTGACGTCAACTCGGCCGATGGGCTGCAG | | |
| | CCAATCAGGGAGTGACACGTCCTAGGCGAAGGAGAATTCTCTTTAATAGGGACGGGGTTTTGTTTTCTCTCTCTCTTGCTTCTCGCTCGCTCTTGCTTCTTGCA | | |
| | CTCTGGCTCCTGAAGATGTAAGCAATAAAGTTTTGCCGCAGAAGATTCTGGTCTGTGGTGTTCTTCCTGGCCGGGCGTGAGAACGCGTCTAATAACA | | |

Denotations of “v1,” “v2,” and “v3” indicate alterations to the promoter/R junction (e.g., between a CMV promoter and the R U5 sequence), designed to mimic the human initiator consensus sequence (YYANWYY) without substituting base pairs. The sequences for v1, v2, and v3 variants of each transposon are shown in Tables S1-S4, as indicated. Specific modifications for each of the retrotransposons are summarized below:

### MusD6/ETnII-B3:

[0878] V1: Full length pCMV promoter with full length MusD6/ETnII-B3 R sequence.
[0879] V2: Full length pCMV promoter with 5′ truncated MusD6/ETnII-B3 R sequence.
[0880] V3: 3′ truncated pCMV promoter with full length MusD6/ETnII-B3 R sequence.

### IAP-92L23:

[0881] V1: Full length pCMV promoter with 5′ extended IAP-92L23 R sequence. The 5′ extension extends into the 3′ end of the U3 sequence.
[0882] V2: 3′ truncated pCMV promoter with full length IAP-92L23 R sequence.

### MusD Driver Plasmids:

[0883] As shown in FIG. 9A, these plasmids generally consisted of a CMV promoter driving expression of a 5′ LTR truncated MusD6 transposon followed by an SV40 polyA signal. 5′ truncations included the removal of the U3 sequence of the 5′ LTR. Notably, these vectors contained 5′ flanking sequences between the 5′ LTR and gag, including the tRNA primer binding sequence (PBS), and 3′ flanking sequences between pol and the 3′ LTR, including a polypurine tract (PPT). Driver plasmids lacking a full-length pol gene were used as a negative control to lack a capacity for reverse-transcription and integration. Pol-deficient vectors were created by inserted a stop codon after V10 of the pol gene and removed the rest of the pol gene. Drivers containing a mutant PBS were also created that prevent tRNA-priming of the transposon.

### Compact MusD Driver Plasmids:

[0884] As shown in FIG. 9B, these plasmids consisted of a CMV promoter driving expression of MusD6 gag-pro-pol followed by an SV40 polyA signal. A kozak consensus sequence was included between the CMV promoter and the gag gene. Driver plasmids lacking a full-length pol gene were used as a negative control to lack a capacity for reverse-transcription and integration. Pol-deficient vectors were created by inserted a stop codon after V10 of the pol gene and removed the rest of the pol gene.

### MusD Template Plasmids:

[0885] As shown in FIG. 9C, these plasmids consisted of a CMV promoter driving expression of a 5′ LTR truncated MusD6 transposon containing a deletion between gag and pol, followed by an SV40 polyA signal. 5′ truncations included the removal of the U3 sequence of the 5′ LTR.

[0886] The gag/pol deletion began at basepair 202 of gag and ended at basepair 2477 of pol. A heterologous object sequence was inserted at basepair 122 in the 3′ flanking region downstream the pol gene. The heterologous object sequence included a gene cassette in the antisense direction containing a EF1 alpha promoter, GFP, and a TK polyA. The GFP contained an intron that is antisense to the coding sequence of the GFP. Therefore, GFP expression only occurred after transcription, splicing and reverse-transcription of the retrotransposon.

### ETnII Template Plasmids:

[0887] These plasmids consisted of a CMV promoter driving expression of a 5′ LTR truncated ETnII-B3 transposon followed by an SV40 polyA signal. A heterologous object was inserted 2760 basepairs downstream the truncated 5′ LTR sequence. The heterologous object sequence included a gene cassette in the antisense direction containing a EF1 alpha promoter, GFP, and a TK polyA. The GFP contained an intron that was antisense to the coding sequence of the GFP. Therefore, GFP expression would only occur after transcription, splicing and reverse-transcription of the retrotransposon.

### Compact MusD Template Plasmids:

[0888] These plasmids remove the 5′ flanking sequence between the PBS and the heterologous object sequence and the 3′ flanking sequence between the heterologous object and the PPT of the MusD template plasmids.

### Compact ETnII Template Plasmids:

[0889] These plasmids remove the 5′ flanking sequence between the PBS and the heterologous object sequence and the 3′ flanking sequence between the heterologous object and the PPT of the ETnII template plasmids.

### DNA Transfection:

[0890] HEK293T cells were plated at 200,000 cells/mL at a volume of 100 μL in 96-well plates in DMEM medium supplemented with 10% fetal bovine serum and placed in a humidified incubator at 37° C. and 5% CO2. The next day, 125 ng of DNA was transfected to each well using TransIT-293 (Mirus). DNA for transfections contain combinations of MusD6 drivers and MusD6/ETnII templates in 1:1 mass ratios (56.25 ng each). A constitutively expressing BFP plasmid (pCAG-BFP) was also co-transfected (12.5 ng) with all the DNA mixtures to ensure cells were efficiently transfected. For samples that contain driver=“none” and/or template=“none”, a CMV plasmid was used that doesn't code for any proteins between the CMV promoter and the SV40 polyA was used.

[0891] After 7 days, a digital droplet PCR instrument was used as a molecular assay to measure integration efficiencies. Genomes were extracted from the transfected or non-treated cells using flash-freezing and a Proteinase K incubation. A Taqman probe was designed to the GFP gene spanning the exon/exon junction, thus only hybridizing upon successful reverse-transcription of the post-spliced RNA template molecule. Forward and reverse primers were designed within the GFP coding sequence. The results of ddPCR copy number analysis (normalized to reference gene RPP30) are shown in FIG. 10.

### Example 8: Plasmid Delivery of an LTR Retrotransposon in Cis

[0892] This example demonstrates LTR retrotransposon-mediated integration of a genetic payload into the genome of human cells in a cis configuration. In order to assess integration, the stability of therapeutic protein expression were measured over a period of time as cells divide. Protein expression stability was conceived to occur as a result of the integration of the gene expression cassette into the human genome.

[0893] To assess expression stability, HEK293T cells were transfected with a (1) plasmid containing an active LTR retrotransposon or (2) plasmid containing an inactive LTR retrotransposon. The plasmids comprised a promoter that mediates transcription of an RNA template which comprises a promoter, an R sequence, a U5 sequence, a primer binding site (PBS) sequence, gag proteins (Matrix, Nucleocapsid, and Capsid), protease (pro) proteins, and pol proteins (Reverse transcriptase and integrase), a heterologous object sequence, polypurine tract (PPT), a 3′ LTR and an SV40 polyA sequence. The 3′LTR comprised a U3, R and U5 sequence. In this example, the 5′ R/U5 and 3′ LTR of the template RNA, and the gag, pro and pol proteins are derived from the IAP-RP23-92L23 LTR retrotransposon. The inactive retrotransposon plasmids contained either an inactivating deletion of the reverse transcriptase protein coding sequence between A14 and the stop codon, which prevents the reverse transcriptase from reverse transcribing the RNA or a mutation of the PBS, termed PBS*. A heterologous object sequence was inserted at basepair 10 in the 3′ flanking region downstream the pol gene. The heterologous object sequence included a gene cassette in the antisense direction containing a EF1 alpha promoter, GFP, and a TK polyA. The GFP contains an intron that is antisense to the coding sequence of the GFP. Therefore, GFP expression only occurred after transcription, splicing and reverse-transcription of the retrotransposon. A detailed view of these exemplary configurations is depicted in FIGS. 11A-11B. Sequences used in the exemplary constructs are listed in Tables S1-S5 above.

### DNA Transfection:

[0894] HEK293T cells were plated at 200,000 cells/mL at a volume of 100 μL in 96-well plates in DMEM medium supplemented with 10% fetal bovine serum and placed in a humidified incubator at 37° C. and 5% CO₂. The next day, 125 ng of DNA was transfected to each well using TransIT-293 (Mirus). DNA for transfections contain 104.16 ng of the retrotransposon plasmids. A constitutively expressing BFP plasmid (pCAG-BFP) was also co-transfected (20.84 ng) with all the DNA mixtures to ensure cells were efficiently transfected.

[0895] After 3, 7 and 10 days, cells were removed at various days post-transfection for flow cytometry analysis, ddPCR preparation and routine cell maintenance. Cells were resuspended in 250 μL of medium and 125 μL were transferred to a round bottom 96 well plate for cytometric analysis. An ACEA Novocyte was used to measure morphological properties (FSC/SSC) and single-cell GFP fluorescent data using a 488 nm laser and 530/30 emission filter. FlowJo (TreeStar) was used to gate for morphologically viable cells (FSC-A/SSC-A) and single cells (FSC-A, FSC-H). Next, % GFP was determined by setting an 0.1% positive gate on GFP-A of non-treated cells and applying this gate on all samples. As shown in FIG. 12, resultant percentage GFP+ cells was substantially higher for IAP than for IAP PBS* or IAP with the pol deletion. The percentage of GFP+ cells also increased substantially from day 3 to day 7 post-transfection.

[0896] A digital droplet PCR instrument was used as a molecular assay to measure integration efficiencies. Genomes were extracted from the transfected or non-treated cells using flash-freezing and a Proteinase K incubation. A Taqman probe was designed to the GFP gene spanning the exon/exon junction, thus only hybridizing upon successful reverse-transcription of the post-spliced RNA template molecule. Forward and reverse primers were designed within the GFP coding sequence. The results of ddPCR copy number analysis (normalized to reference gene RPP30) are shown in FIG. 13. Integration efficiency was substantially higher for the IAP setting compared to IAP PBS* and IAP pol deletion at all time points tested (i.e., day 3, day 7, and day 10).

1. A system for modifying DNA comprising:
a) a template RNA comprising a first long terminal repeat (LTR), a second LTR, a heterologous object sequence encoding a therapeutic effector, positioned between the first LTR and the second LTR, and optionally a primer binding site (PBS); or a DNA molecule encoding the template RNA;
b) an LTR retrotransposon structural polypeptide domain (e.g., gag, e.g., a viral capsid (CA) protein), or a nucleic acid molecule encoding the structural polypeptide domain; and
c) an LTR retrotransposon reverse transcriptase polypeptide domain (e.g., pol) capable of reverse transcribing the template RNA, thereby producing a template DNA, or a nucleic acid molecule encoding the reverse transcriptase polypeptide domain.

2. A system for modifying DNA comprising:
a) a template RNA comprising a first LTR, a second LTR, and a heterologous object sequence encoding a therapeutic effector, positioned between the first LTR and the second LTR and optionally a primer binding site (PBS); or a DNA molecule encoding the template RNA;
b) a retroviral structural polypeptide domain (e.g., gag), or a nucleic acid molecule encoding the structural polypeptide domain;
c) a retroviral reverse transcriptase polypeptide domain (e.g., pol) capable of reverse transcribing the template RNA, thereby producing a template DNA, or a nucleic acid molecule encoding the reverse transcriptase polypeptide domain; and
the system comprises neither an envelope polypeptide domain (e.g., a retroviral envelope polypeptide domain, e.g., a lentiviral envelope polypeptide domain) nor a nucleic acid molecule encoding the envelope polypeptide domain.

3. A cell-free system for modifying DNA comprising:
a) a template RNA comprising a first LTR, a second LTR, and a heterologous object sequence encoding a therapeutic effector, positioned between the first LTR and the second LTR and optionally a primer binding site (PBS); or a DNA molecule encoding the template RNA;
b) a first RNA encoding a retroviral structural polypeptide domain (e.g., gag);
c) a second RNA encoding a retroviral reverse transcriptase polypeptide domain (e.g., pol) capable of reverse transcribing the template RNA, thereby producing a template DNA, or a nucleic acid molecule encoding the reverse transcriptase polypeptide domain; and
wherein the first RNA sequence and the second RNA sequence are optionally part of the same nucleic acid molecule.

4. A template RNA comprising:
a first retrotransposon LTR,
a second retrotransposon LTR,
a heterologous object sequence encoding a therapeutic effector, positioned between the first LTR and the second LTR, and
optionally, a primer binding site (PBS).

5. A method of delivering a heterologous object sequence to a target cell, comprising:
a) introducing into the target cell (e.g., contacting the target cell with) a template RNA comprising a first LTR, a second LTR, and a heterologous object sequence encoding a therapeutic effector, positioned between the first LTR and the second LTR, and optionally a primer binding site (PBS); and
b) introducing into the target cell (e.g., contacting the target cell with) an LTR retrotransposon structural polypeptide domain (e.g., gag), or a nucleic acid molecule encoding the structural polypeptide domain, and an LTR retrotransposon reverse transcriptase polypeptide domain (e.g., pol) capable of reverse transcribing the template RNA, thereby producing a template DNA, or a nucleic acid molecule encoding the reverse transcriptase polypeptide domain; and
c) incubating the target cell under conditions suitable for production of the template DNA.

6. A method of delivering a heterologous object sequence to a target cell, comprising:
a) introducing into the target cell (e.g., contacting the target cell with) a template RNA comprising a first LTR, a second LTR, and a heterologous object sequence encoding a therapeutic effector, positioned between the first LTR and the second LTR, and optionally a primer binding site (PBS); and
b) contacting the target cell with a first RNA encoding a retroviral structural polypeptide domain (e.g., gag) and a second RNA encoding a retroviral reverse transcriptase polypeptide domain (e.g., pol) capable of reverse transcribing the template RNA, thereby producing a template DNA, wherein the first RNA and the second RNA are optionally part of the same RNA molecule, and
c) incubating the target cell under conditions suitable for production of the template DNA.

7. A method of delivering a heterologous object sequence to a target cell, comprising:
a) introducing into the target cell (e.g., contacting the target cell with) a template RNA comprising a first LTR, a second LTR, and a heterologous object sequence encoding a therapeutic effector, positioned between the first LTR and the second LTR, and optionally a primer binding site (PBS); and
b) introducing into the target cell (e.g., contacting the target cell with) a retroviral structural polypeptide domain (e.g., gag), or a nucleic acid molecule encoding the structural polypeptide domain and a retroviral reverse transcriptase polypeptide domain (e.g., pol) capable of reverse transcribing the template RNA, thereby producing a template DNA, or a nucleic acid molecule encoding the reverse transcriptase polypeptide domain; and
c) incubating the target cell under conditions suitable for production of the template DNA;
wherein the method does not comprise introducing into the target cell either of an envelope polypeptide domain or a nucleic acid molecule encoding the envelope polypeptide domain.

8. A method of delivering a heterologous object sequence to a target cell of a patient in need thereof (e.g., in vivo or ex vivo delivery), comprising:
a) introducing into the target cell (e.g., contacting the target cell with) a template RNA comprising a first LTR, a second LTR, and a heterologous object sequence encoding a therapeutic effector, positioned between the first LTR and the second LTR, and optionally a primer binding site (PBS); and
b) contacting the target cell with a first polynucleotide encoding a retroviral structural polypeptide domain (e.g., gag), and a second polynucleotide encoding retroviral reverse transcriptase polypeptide domain (e.g., pol) capable of reverse transcribing the template RNA, thereby producing a template DNA, wherein the first polynucleotide and the second polynucleotide are optionally part of the same polynucleotide molecule; and
c) incubating the target cell under conditions suitable for production of the template DNA.

The application's sequence listing, which the Patent Office published only in electronic form, follows.

SEQUENCE LISTING (385 sequences)

SEQ ID NO: 1 - DNA, 20 bp, Artificial Sequence
  Description of Artificial Sequence: Synthetic oligonucleotide
ggggccactagggacaggat

SEQ ID NO: 2 - protein, 4 aa, Artificial Sequence
  Description of Artificial Sequence: Synthetic peptide
  See specification as filed for detailed description of substitutions and preferred embodiments
GGGS

SEQ ID NO: 3 - protein, 5 aa, Artificial Sequence
  Description of Artificial Sequence: Synthetic peptide
CPRSC

SEQ ID NO: 4 - DNA, 26 bp, Homo sapiens
ctgacccttctctctctcccccagag

SEQ ID NO: 5 - DNA, 15 bp, Homo sapiens
tttctctcccacaag

SEQ ID NO: 6 - protein, 17 aa, Artificial Sequence
  Description of Artificial Sequence: Synthetic peptide
  MOD_RES (3)..(4): Any amino acid
  MOD_RES (6)..(10): Any amino acid
  MOD_RES (12)..(13): Any amino acid
  MOD_RES (15)..(16): Any amino acid
QGXXEXXXXXFXXLXXH

SEQ ID NO: 7 - protein, 14 aa, Artificial Sequence
  Description of Artificial Sequence: Synthetic peptide
  MOD_RES (2)..(3): Any amino acid
  MOD_RES (5)..(8): Any amino acid
  MOD_RES (10)..(13): Any amino acid
CXXCXXXXHXXXXC

SEQ ID NO: 8 - protein, 4 aa, Unknown
  Description of Unknown: RT domain motif sequence
YADD

SEQ ID NO: 9 - protein, 4 aa, Unknown
  Description of Unknown: RT domain motif sequence
YMDD

SEQ ID NO: 10 - protein, 4 aa, Artificial Sequence
  Description of Artificial Sequence: Synthetic peptide
YVDD

SEQ ID NO: 11 - protein, 672 aa, Unknown
  Description of Unknown: Moloney murine leukemia virus sequence
TLNIEDEYRLHETSKEPDVSLGSTWLSDFPQAWAETGGMGLAVRQAPLIIPLKATSTPVSIKQYPMSQEARLGIKPHIQRLLDQGILVPCQSPWNTPLLPVKKPGTNDYRPVQDLREVNKRVEDIHPTVPNPYNLLSGLPPSHQWYTVLDLKDAFFCLRLHPTSQPLFAFEWRDPEMGISGQLTWTRLPQGFKNSPTLFDEALHRDLADFRIQHPDLILLQYVDDLLLAATSELDCQQGTRALLQTLGNLGYRASAKKAQICQKQVKYLGYLLKEGQRWLTEARKETVMGQPTPKTPRQLREFLGTAGFCRLWIPGFAEMAAPLYPLTKTGTLFNWGPDQQKAYQEIKQALLTAPALGLPDLTKPFELFVDEKQGYAKGVLTQKLGPWRRPVAYLSKKLDPVAAGWPPCLRMVAAIAVLTKDAGKLTMGQPLVILAPHAVEALVKQPPDRWLSNARMTHYQALLLDTDRVQFGPVVALNPATLLPLPEEGLQHNCLDILAEAHGTRPDLTDQPLPDADHTWYTDGSSLLQEGQRKAGAAVTTETEVIWAKALPAGTSAQRAELIALTQALKMAEGKKLNVYTDSRYAFATAHIHGEIYRRRGLLTSEGKEIKNKDEILALLKALFLPKRLSIIHCPGHQKGHSAEARGNRMADQAARKAAITETPDTSTLLI

SEQ ID NO: 12 - protein, 660 aa, Unknown
  Description of Unknown: Moloney murine leukemia virus sequence
TLNIEDEHRLHETSKEPDVSLGSTWLSDFPQAWAETGGMGLAVRQAPLIIPLKATSTPVSIKQYPMSQEARLGIKPHIQRLLDQGILVPCQSPWNTPLLPVKKPGTNDYRPVQDLREVNKRVEDIHPTVPNPYNLLSGLPPSHQWYTVLDLKDAFFCLRLHPTSQPLFAFEWRDPEMGISGQLTWTRLPQGFKNSPTLFDEALHRDLADFRIQHPDLILLQYVDDLLLAATSELDCQQGTRALLQTLGNLGYRASAKKAQICQKQVKYLGYLLKEGQRWLTEARKETVMGQPTPKTPRQLREFLGTAGFCRLWIPGFAEMAAPLYPLTKTGTLFNWGPDQQKAYQEIKQALLTAPALGLPDLTKPFELFVDEKQGYAKGVLTQKLGPWRRPVAYLSKKLDPVAAGWPPCLRMVAAIAVLTKDAGKLTMGQPLVILAPHAVEALVKQPPDRWLSNARMTHYQALLLDTDRVQFGPVVALNPATLLPLPEEGLQHNCLDILAEAHGTRPDLTDQPLPDADHTWYTDGSSLLQEGQRKAGAAVTTETEVIWAKALPAGTSAQRAELIALTQALKMAEGKKLNVYTDSRYAFATAHIHGEIYRRRGLLTSEGKEIKNKDEILALLKALFLPKRLSIIHCPGHQKGHSAEARGNRMADQAARKAA

SEQ ID NO: 13 - protein, 672 aa, Artificial Sequence
  Description of Artificial Sequence: Synthetic polypeptide
TLNIEDEYRLHETSKEPDVSLGSTWLSDFPQAWAETGGMGLAVRQAPLIIPLKATSTPVSIKQYPMSQEARLGIKPHIQRLLDQGILVPCQSPWNTPLLPVKKPGTNDYRPVQDLREVNKRVEDIHPTVPNPYNLLSGLPPSHQWYTVLDLKDAFFCLRLHPTSQPLFAFEWRDPEMGISGQLTWTRLPQGFKNSPTLFNEALHRDLADFRIQHPDLILLQYVDDLLLAATSELDCQQGTRALLQTLGNLGYRASAKKAQICQKQVKYLGYLLKEGQRWLTEARKETVMGQPTPKTPRQLREFLGKAGFCRLFIPGFAEMAAPLYPLTKPGTLFNWGPDQQKAYQEIKQALLTAPALGLPDLTKPFELFVDEKQGYAKGVLTQKLGPWRRPVAYLSKKLDPVAAGWPPCLRMVAAIAVLTKDAGKLTMGQPLVILAPHAVEALVKQPPDRWLSNARMTHYQALLLDTDRVQFGPVVALNPATLLPLPEEGLQHNCLDILAEAHGTRPDLTDQPLPDADHTWYTDGSSLLQEGQRKAGAAVTTETEVIWAKALPAGTSAQRAELIALTQALKMAEGKKLNVYTDSRYAFATAHIHGEIYRRRGWLTSEGKEIKNKDEILALLKALFLPKRLSIIHCPGHQKGHSAEARGNRMADQAARKAAITETPDTSTLLI

SEQ ID NO: 14 - protein, 33 aa, Artificial Sequence
  Description of Artificial Sequence: Synthetic polypeptide
SGGSSGGSSGSETPGTSESATPESSGGSSGGSS

SEQ ID NO: 15 - protein, 6 aa, Artificial Sequence
  Description of Artificial Sequence: Synthetic peptide
GGSGGS

SEQ ID NO: 16 - protein, 9 aa, Artificial Sequence
  Description of Artificial Sequence: Synthetic peptide
GGSGGSGGS

SEQ ID NO: 17 - protein, 12 aa, Artificial Sequence
  Description of Artificial Sequence: Synthetic peptide
GGSGGSGGSGGS

SEQ ID NO: 18 - protein, 15 aa, Artificial Sequence
  Description of Artificial Sequence: Synthetic peptide
GGSGGSGGSGGSGGS

SEQ ID NO: 19 - protein, 18 aa, Artificial Sequence
  Description of Artificial Sequence: Synthetic peptide
GGSGGSGGSGGSGGSGGS

SEQ ID NO: 20 - protein, 5 aa, Artificial Sequence
  Description of Artificial Sequence: Synthetic peptide
GGGGS

SEQ ID NO: 21 - protein, 10 aa, Artificial Sequence
  Description of Artificial Sequence: Synthetic peptide
GGGGSGGGGS

SEQ ID NO: 22 - protein, 15 aa, Artificial Sequence
  Description of Artificial Sequence: Synthetic peptide
GGGGSGGGGSGGGGS

SEQ ID NO: 23 - protein, 20 aa, Artificial Sequence
  Description of Artificial Sequence: Synthetic peptide
GGGGSGGGGSGGGGSGGGGS

SEQ ID NO: 24 - protein, 25 aa, Artificial Sequence
  Description of Artificial Sequence: Synthetic peptide
GGGGSGGGGSGGGGSGGGGSGGGGS

SEQ ID NO: 25 - protein, 30 aa, Artificial Sequence
  Description of Artificial Sequence: Synthetic polypeptide
GGGGSGGGGSGGGGSGGGGSGGGGSGGGGS

SEQ ID NO: 26 - protein, 4 aa, Artificial Sequence
  Description of Artificial Sequence: Synthetic peptide
GGGG

SEQ ID NO: 27 - protein, 5 aa, Artificial Sequence
  Description of Artificial Sequence: Synthetic peptide
GGGGG

SEQ ID NO: 28 - protein, 6 aa, Artificial Sequence
  Description of Artificial Sequence: Synthetic peptide
GGGGGG

SEQ ID NO: 29 - protein, 7 aa, Artificial Sequence
  Description of Artificial Sequence: Synthetic peptide
GGGGGGG

SEQ ID NO: 30 - protein, 8 aa, Artificial Sequence
  Description of Artificial Sequence: Synthetic peptide
GGGGGGGG

SEQ ID NO: 31 - protein, 6 aa, Artificial Sequence
  Description of Artificial Sequence: Synthetic peptide
GSSGSS

SEQ ID NO: 32 - protein, 9 aa, Artificial Sequence
  Description of Artificial Sequence: Synthetic peptide
GSSGSSGSS

SEQ ID NO: 33 - protein, 12 aa, Artificial Sequence
  Description of Artificial Sequence: Synthetic peptide
GSSGSSGSSGSS

SEQ ID NO: 34 - protein, 15 aa, Artificial Sequence
  Description of Artificial Sequence: Synthetic peptide
GSSGSSGSSGSSGSS

SEQ ID NO: 35 - protein, 18 aa, Artificial Sequence
  Description of Artificial Sequence: Synthetic peptide
GSSGSSGSSGSSGSSGSS

SEQ ID NO: 36 - protein, 5 aa, Artificial Sequence
  Description of Artificial Sequence: Synthetic peptide
EAAAK

SEQ ID NO: 37 - protein, 10 aa, Artificial Sequence
  Description of Artificial Sequence: Synthetic peptide
EAAAKEAAAK

SEQ ID NO: 38 - protein, 15 aa, Artificial Sequence
  Description of Artificial Sequence: Synthetic peptide
EAAAKEAAAKEAAAK

SEQ ID NO: 39 - protein, 20 aa, Artificial Sequence
  Description of Artificial Sequence: Synthetic peptide
EAAAKEAAAKEAAAKEAAAK

SEQ ID NO: 40 - protein, 25 aa, Artificial Sequence
  Description of Artificial Sequence: Synthetic peptide
EAAAKEAAAKEAAAKEAAAKEAAAK

SEQ ID NO: 41 - protein, 30 aa, Artificial Sequence
  Description of Artificial Sequence: Synthetic polypeptide
EAAAKEAAAKEAAAKEAAAKEAAAKEAAAK

SEQ ID NO: 42 - protein, 5 aa, Artificial Sequence
  Description of Artificial Sequence: Synthetic peptide
PAPAP

SEQ ID NO: 43 - protein, 7 aa, Artificial Sequence
  Description of Artificial Sequence: Synthetic peptide
PAPAPAP

SEQ ID NO: 44 - protein, 9 aa, Artificial Sequence
  Description of Artificial Sequence: Synthetic peptide
PAPAPAPAP

SEQ ID NO: 45 - protein, 11 aa, Artificial Sequence
  Description of Artificial Sequence: Synthetic peptide
PAPAPAPAPAP

SEQ ID NO: 46 - protein, 13 aa, Artificial Sequence
  Description of Artificial Sequence: Synthetic peptide
PAPAPAPAPAPAP

SEQ ID NO: 47 - protein, 6 aa, Artificial Sequence
  Description of Artificial Sequence: Synthetic peptide
GGSGGG

SEQ ID NO: 48 - protein, 6 aa, Artificial Sequence
  Description of Artificial Sequence: Synthetic peptide
GGGGGS

SEQ ID NO: 49 - protein, 6 aa, Artificial Sequence
  Description of Artificial Sequence: Synthetic peptide
GGSGSS

SEQ ID NO: 50 - protein, 6 aa, Artificial Sequence
  Description of Artificial Sequence: Synthetic peptide
GSSGGS

SEQ ID NO: 51 - protein, 8 aa, Artificial Sequence
  Description of Artificial Sequence: Synthetic peptide
GGSEAAAK

SEQ ID NO: 52 - protein, 8 aa, Artificial Sequence
  Description of Artificial Sequence: Synthetic peptide
EAAAKGGS

SEQ ID NO: 53 - protein, 6 aa, Artificial Sequence
  Description of Artificial Sequence: Synthetic peptide
GGSPAP

SEQ ID NO: 54 - protein, 6 aa, Artificial Sequence
  Description of Artificial Sequence: Synthetic peptide
PAPGGS

SEQ ID NO: 55 - protein, 6 aa, Artificial Sequence
  Description of Artificial Sequence: Synthetic peptide
GGGGSS

SEQ ID NO: 56 - protein, 6 aa, Artificial Sequence
  Description of Artificial Sequence: Synthetic peptide
GSSGGG

SEQ ID NO: 57 - protein, 8 aa, Artificial Sequence
  Description of Artificial Sequence: Synthetic peptide
GGGEAAAK

SEQ ID NO: 58 - protein, 8 aa, Artificial Sequence
  Description of Artificial Sequence: Synthetic peptide
EAAAKGGG

SEQ ID NO: 59 - protein, 6 aa, Artificial Sequence
  Description of Artificial Sequence: Synthetic peptide
GGGPAP

SEQ ID NO: 60 - protein, 6 aa, Artificial Sequence
  Description of Artificial Sequence: Synthetic peptide
PAPGGG

SEQ ID NO: 61 - protein, 8 aa, Artificial Sequence
  Description of Artificial Sequence: Synthetic peptide
GSSEAAAK

SEQ ID NO: 62 - protein, 8 aa, Artificial Sequence
  Description of Artificial Sequence: Synthetic peptide
EAAAKGSS

SEQ ID NO: 63 - protein, 6 aa, Artificial Sequence
  Description of Artificial Sequence: Synthetic peptide
GSSPAP

SEQ ID NO: 64 - protein, 6 aa, Artificial Sequence
  Description of Artificial Sequence: Synthetic peptide
PAPGSS

SEQ ID NO: 65 - protein, 8 aa, Artificial Sequence
  Description of Artificial Sequence: Synthetic peptide
EAAAKPAP

SEQ ID NO: 66 - protein, 8 aa, Artificial Sequence
  Description of Artificial Sequence: Synthetic peptide
PAPEAAAK

SEQ ID NO: 67 - protein, 9 aa, Artificial Sequence
  Description of Artificial Sequence: Synthetic peptide
GGSGGGGSS

SEQ ID NO: 68 - protein, 9 aa, Artificial Sequence
  Description of Artificial Sequence: Synthetic peptide
GGSGSSGGG

SEQ ID NO: 69 - protein, 9 aa, Artificial Sequence
  Description of Artificial Sequence: Synthetic peptide
GGGGGSGSS

SEQ ID NO: 70 - protein, 9 aa, Artificial Sequence
  Description of Artificial Sequence: Synthetic peptide
GGGGSSGGS

SEQ ID NO: 71 - protein, 9 aa, Artificial Sequence
  Description of Artificial Sequence: Synthetic peptide
GSSGGSGGG

SEQ ID NO: 72 - protein, 9 aa, Artificial Sequence
  Description of Artificial Sequence: Synthetic peptide
GSSGGGGGS

SEQ ID NO: 73 - protein, 11 aa, Artificial Sequence
  Description of Artificial Sequence: Synthetic peptide
GGSGGGEAAAK

SEQ ID NO: 74 - protein, 11 aa, Artificial Sequence
  Description of Artificial Sequence: Synthetic peptide
GGSEAAAKGGG

SEQ ID NO: 75 - protein, 11 aa, Artificial Sequence
  Description of Artificial Sequence: Synthetic peptide
GGGGGSEAAAK

SEQ ID NO: 76 - protein, 11 aa, Artificial Sequence
  Description of Artificial Sequence: Synthetic peptide
GGGEAAAKGGS

SEQ ID NO: 77 - protein, 11 aa, Artificial Sequence
  Description of Artificial Sequence: Synthetic peptide
EAAAKGGSGGG

SEQ ID NO: 78 - protein, 11 aa, Artificial Sequence
  Description of Artificial Sequence: Synthetic peptide
EAAAKGGGGGS

SEQ ID NO: 79 - protein, 9 aa, Artificial Sequence
  Description of Artificial Sequence: Synthetic peptide
GGSGGGPAP

SEQ ID NO: 80 - protein, 9 aa, Artificial Sequence
  Description of Artificial Sequence: Synthetic peptide
GGSPAPGGG

SEQ ID NO: 81 - protein, 9 aa, Artificial Sequence
  Description of Artificial Sequence: Synthetic peptide
GGGGGSPAP

SEQ ID NO: 82 - protein, 9 aa, Artificial Sequence
  Description of Artificial Sequence: Synthetic peptide
GGGPAPGGS

SEQ ID NO: 83 - protein, 9 aa, Artificial Sequence
  Description of Artificial Sequence: Synthetic peptide
PAPGGSGGG

SEQ ID NO: 84 - protein, 9 aa, Artificial Sequence
  Description of Artificial Sequence: Synthetic peptide
PAPGGGGGS

SEQ ID NO: 85 - protein, 11 aa, Artificial Sequence
  Description of Artificial Sequence: Synthetic peptide
GGSGSSEAAAK

SEQ ID NO: 86 - protein, 11 aa, Artificial Sequence
  Description of Artificial Sequence: Synthetic peptide
GGSEAAAKGSS

SEQ ID NO: 87 - protein, 11 aa, Artificial Sequence
  Description of Artificial Sequence: Synthetic peptide
GSSGGSEAAAK

SEQ ID NO: 88 - protein, 11 aa, Artificial Sequence
  Description of Artificial Sequence: Synthetic peptide
GSSEAAAKGGS

SEQ ID NO: 89 - protein, 11 aa, Artificial Sequence
  Description of Artificial Sequence: Synthetic peptide
EAAAKGGSGSS

SEQ ID NO: 90 - protein, 11 aa, Artificial Sequence
  Description of Artificial Sequence: Synthetic peptide
EAAAKGSSGGS

SEQ ID NO: 91 - protein, 9 aa, Artificial Sequence
  Description of Artificial Sequence: Synthetic peptide
GGSGSSPAP

SEQ ID NO: 92 - protein, 9 aa, Artificial Sequence
  Description of Artificial Sequence: Synthetic peptide
GGSPAPGSS

SEQ ID NO: 93 - protein, 9 aa, Artificial Sequence
  Description of Artificial Sequence: Synthetic peptide
GSSGGSPAP

SEQ ID NO: 94 - protein, 9 aa, Artificial Sequence
  Description of Artificial Sequence: Synthetic peptide
GSSPAPGGS

SEQ ID NO: 95 - protein, 9 aa, Artificial Sequence
  Description of Artificial Sequence: Synthetic peptide
PAPGGSGSS

SEQ ID NO: 96 - protein, 9 aa, Artificial Sequence
  Description of Artificial Sequence: Synthetic peptide
PAPGSSGGS

SEQ ID NO: 97 - protein, 11 aa, Artificial Sequence
  Description of Artificial Sequence: Synthetic peptide
GGSEAAAKPAP

SEQ ID NO: 98 - protein, 11 aa, Artificial Sequence
  Description of Artificial Sequence: Synthetic peptide
GGSPAPEAAAK

SEQ ID NO: 99 - protein, 11 aa, Artificial Sequence
  Description of Artificial Sequence: Synthetic peptide
EAAAKGGSPAP

SEQ ID NO: 100 - protein, 11 aa, Artificial Sequence
  Description of Artificial Sequence: Synthetic peptide
EAAAKPAPGGS

SEQ ID NO: 101 - protein, 11 aa, Artificial Sequence
  Description of Artificial Sequence: Synthetic peptide
PAPGGSEAAAK

SEQ ID NO: 102 - protein, 11 aa, Artificial Sequence
  Description of Artificial Sequence: Synthetic peptide
PAPEAAAKGGS

SEQ ID NO: 103 - protein, 11 aa, Artificial Sequence
  Description of Artificial Sequence: Synthetic peptide
GGGGSSEAAAK

SEQ ID NO: 104 - protein, 11 aa, Artificial Sequence
  Description of Artificial Sequence: Synthetic peptide
GGGEAAAKGSS

SEQ ID NO: 105 - protein, 11 aa, Artificial Sequence
  Description of Artificial Sequence: Synthetic peptide
GSSGGGEAAAK

SEQ ID NO: 106 - protein, 11 aa, Artificial Sequence
  Description of Artificial Sequence: Synthetic peptide
GSSEAAAKGGG

SEQ ID NO: 107 - protein, 11 aa, Artificial Sequence
  Description of Artificial Sequence: Synthetic peptide
EAAAKGGGGSS

SEQ ID NO: 108 - protein, 11 aa, Artificial Sequence
  Description of Artificial Sequence: Synthetic peptide
EAAAKGSSGGG

SEQ ID NO: 109 - protein, 9 aa, Artificial Sequence
  Description of Artificial Sequence: Synthetic peptide
GGGGSSPAP

SEQ ID NO: 110 - protein, 9 aa, Artificial Sequence
  Description of Artificial Sequence: Synthetic peptide
GGGPAPGSS

SEQ ID NO: 111 - protein, 9 aa, Artificial Sequence
  Description of Artificial Sequence: Synthetic peptide
GSSGGGPAP

SEQ ID NO: 112 - protein, 9 aa, Artificial Sequence
  Description of Artificial Sequence: Synthetic peptide
GSSPAPGGG

SEQ ID NO: 113 - protein, 9 aa, Artificial Sequence
  Description of Artificial Sequence: Synthetic peptide
PAPGGGGSS

SEQ ID NO: 114 - protein, 9 aa, Artificial Sequence
  Description of Artificial Sequence: Synthetic peptide
PAPGSSGGG

SEQ ID NO: 115 - protein, 11 aa, Artificial Sequence
  Description of Artificial Sequence: Synthetic peptide
GGGEAAAKPAP

SEQ ID NO: 116 - protein, 11 aa, Artificial Sequence
  Description of Artificial Sequence: Synthetic peptide
GGGPAPEAAAK

SEQ ID NO: 117 - protein, 11 aa, Artificial Sequence
  Description of Artificial Sequence: Synthetic peptide
EAAAKGGGPAP

SEQ ID NO: 118 - protein, 11 aa, Artificial Sequence
  Description of Artificial Sequence: Synthetic peptide
EAAAKPAPGGG

SEQ ID NO: 119 - protein, 11 aa, Artificial Sequence
  Description of Artificial Sequence: Synthetic peptide
PAPGGGEAAAK

SEQ ID NO: 120 - protein, 11 aa, Artificial Sequence
  Description of Artificial Sequence: Synthetic peptide
PAPEAAAKGGG

SEQ ID NO: 121 - protein, 11 aa, Artificial Sequence
  Description of Artificial Sequence: Synthetic peptide
GSSEAAAKPAP

SEQ ID NO: 122 - protein, 11 aa, Artificial Sequence
  Description of Artificial Sequence: Synthetic peptide
GSSPAPEAAAK

SEQ ID NO: 123 - protein, 11 aa, Artificial Sequence
  Description of Artificial Sequence: Synthetic peptide
EAAAKGSSPAP

SEQ ID NO: 124 - protein, 11 aa, Artificial Sequence
  Description of Artificial Sequence: Synthetic peptide
EAAAKPAPGSS

SEQ ID NO: 125 - protein, 11 aa, Artificial Sequence
  Description of Artificial Sequence: Synthetic peptide
PAPGSSEAAAK

SEQ ID NO: 126 - protein, 11 aa, Artificial Sequence
  Description of Artificial Sequence: Synthetic peptide
PAPEAAAKGSS

SEQ ID NO: 127 - protein, 46 aa, Artificial Sequence
  Description of Artificial Sequence: Synthetic polypeptide
AEAAAKEAAAKEAAAKEAAAKALEAEAAAKEAAAKEAAAKEAAAKA

SEQ ID NO: 128 - protein, 15 aa, Artificial Sequence
  Description of Artificial Sequence: Synthetic peptide
GGGGSEAAAKGGGGS

SEQ ID NO: 129 - protein, 15 aa, Artificial Sequence
  Description of Artificial Sequence: Synthetic peptide
EAAAKGGGGSEAAAK

SEQ ID NO: 130 - protein, 16 aa, Artificial Sequence
  Description of Artificial Sequence: Synthetic peptide
SGSETPGTSESATPES

SEQ ID NO: 131 - protein, 12 aa, Artificial Sequence
  Description of Artificial Sequence: Synthetic peptide
GSAGSAAGSGEF

SEQ ID NO: 132 - RNA, 47 nt, Artificial Sequence
  Description of Artificial Sequence: Synthetic oligonucleotide
gggaaauaagagagaaaagaagaguaagaagaaauauaagagccacc

SEQ ID NO: 133 - RNA, 110 nt, Artificial Sequence
  Description of Artificial Sequence: Synthetic polynucleotide
ugauaauaggcuggagccucgguggccaugcuucuugccccuugggccuccccccagccccuccuccccuuccugcacccguacccccguggucuuugaauaaagucuga

SEQ ID NO: 134 - RNA, 21 nt, Homo sapiens
cauaaaguagaaagcacuacu

SEQ ID NO: 135 - RNA, 23 nt, Homo sapiens
uguaguguuuccuacuuuaugga

SEQ ID NO: 136 - RNA, 24 nt, Homo sapiens
uuuggcaaugguagaacucacacu

SEQ ID NO: 137 - RNA, 21 nt, Homo sapiens
ugguucuagacuugccaacua

SEQ ID NO: 138 - RNA, 22 nt, Homo sapiens
uauggcacugguagaauucacu

SEQ ID NO: 139 - RNA, 22 nt, Homo sapiens
gugaauuaccgaagggccauaa

SEQ ID NO: 140 - RNA, 22 nt, Homo sapiens
uggagugugacaaugguguuug

SEQ ID NO: 141 - RNA, 22 nt, Homo sapiens
aacgccauuaucacacuaaaua

SEQ ID NO: 142 - protein, 30 aa, Artificial Sequence
  Description of Artificial Sequence: Synthetic polypeptide
MDSLLMNRRKFLYQFKNVRWAKGRRETYLC

SEQ ID NO: 143 - protein, 28 aa, Artificial Sequence
  Description of Artificial Sequence: Synthetic peptide
PKKRKVEGADKRTADGSEFESPKKKRKV

SEQ ID NO: 144 - protein, 40 aa, Artificial Sequence
  Description of Artificial Sequence: Synthetic polypeptide
RKSGKIAAIWKRPRKPKKKRKVKRTADGSEFESPKKKRKV

SEQ ID NO: 145 - protein, 17 aa, Artificial Sequence
  Description of Artificial Sequence: Synthetic peptide
KKTELQTTNAENKTKKL

SEQ ID NO: 146 - protein, 19 aa, Artificial Sequence
  Description of Artificial Sequence: Synthetic peptide
KRGINDRNFWRGENGRKTR

SEQ ID NO: 147 - protein, 16 aa, Artificial Sequence
  Description of Artificial Sequence: Synthetic peptide
KRPAATKKAGQAKKKK

SEQ ID NO: 148 - protein, 30 aa, Rattus norvegicus
AHFKISGEKRPSTDPGKKAKNPKKKKKKDP

SEQ ID NO: 149 - protein, 12 aa, Saccharomyces cerevisiae
AHRAKKMSKTHA

SEQ ID NO: 150 - protein, 14 aa, Unknown
  Description of Unknown: NLS sequence
ASPEYVNLPINGNG

SEQ ID NO: 151 - protein, 7 aa, Unknown
  Description of Unknown: NLS sequence
CTKRPRW

SEQ ID NO: 152 - protein, 16 aa, Unknown
  Description of Unknown: NLS sequence
DKAKRVSRNKSEKKRR

SEQ ID NO: 153 - protein, 15 aa, Unknown
  Description of Unknown: NLS sequence
EELRLKEELLKGIYA

SEQ ID NO: 154 - protein, 16 aa, Caenorhabditis elegans
EEQLRRRKNSRLNNTG

SEQ ID NO: 155 - protein, 24 aa, Unknown
  Description of Unknown: NLS sequence
EVLKVIRTGKRKKKAWKRMVTKVC

SEQ ID NO: 156 - protein, 15 aa, Unknown
  Description of Unknown: NLS sequence
HHHHHHHHHHHHQPH

SEQ ID NO: 157 - protein, 17 aa, Unknown
  Description of Unknown: NLS sequence
HKKKHPDASVNFSEFSK

SEQ ID NO: 158 - protein, 6 aa, Oryza sativa
HKRTKK

SEQ ID NO: 159 - protein, 29 aa, Unknown
  Description of Unknown: NLS sequence
IINGRKLKLKKSRRRSSQTSNNSFTSRRS

SEQ ID NO: 160 - protein, 8 aa, Oryza sativa
KAEQERRK

SEQ ID NO: 161 - protein, 18 aa, Unknown
  Description of Unknown: NLS sequence
KEKRKRREELFIEQKKRK

SEQ ID NO: 162 - protein, 14 aa, Mus musculus
KKGKDEWFSRGKKP

SEQ ID NO: 163 - protein, 12 aa, Homo sapiens
KKGPSVQKRKKT

SEQ ID NO: 164 - protein, 16 aa, Unknown
  Description of Unknown: NLS sequence
KKKTVINDLLHYKKEK

SEQ ID NO: 165 - protein, 17 aa, Unknown
  Description of Unknown: NLS sequence
KKNGGKGKNKPSAKIKK

SEQ ID NO: 166 - protein, 13 aa, Unknown
  Description of Unknown: NLS sequence
KKPKWDDFKKKKK

SEQ ID NO: 167 - protein, 6 aa, Unknown
  Description of Unknown: NLS sequence
KKRKKD

SEQ ID NO: 168 - protein, 9 aa, Unknown
  Description of Unknown: NLS sequence
KKRRKRRRK

SEQ ID NO: 169 - protein, 9 aa, Unknown
  Description of Unknown: NLS sequence
KKRRRRARK

SEQ ID NO: 170 - protein, 7 aa, Homo sapiens
KKSKRGR

SEQ ID NO: 171 - protein, 8 aa, Zea mays
KKSRKRGS

SEQ ID NO: 172 - protein, 17 aa, Unknown
  Description of Unknown: NLS sequence
KKSTALSRELGKIMRRR

SEQ ID NO: 173 - protein, 17 aa, Dictyostelium discoideum
KKSYQDPEIIAHSRPRK

SEQ ID NO: 174 - protein, 17 aa, Unknown
  Description of Unknown: NLS sequence
KKTGKNRKLKSKRVKTR

SEQ ID NO: 175 - protein, 17 aa, Oryza sativa
KKVSIAGQSGKLWRWKR

SEQ ID NO: 176 - protein, 20 aa, Unknown
  Description of Unknown: NLS sequence
KKYENVVIKRSPRKRGRPRK

SEQ ID NO: 177 - protein, 6 aa, Unknown
  Description of Unknown: NLS sequence
KNKKRK

SEQ ID NO: 178 - protein, 6 aa, Unknown
  Description of Unknown: NLS sequence
KPKKKR

SEQ ID NO: 179 - protein, 19 aa, Danio rerio
KRAMKDDSHGNSTSPKRRK

SEQ ID NO: 180 - protein, 17 aa, Homo sapiens
KRANSNLVAAYEKAKKK

SEQ ID NO: 181 - protein, 22 aa, Unknown
  Description of Unknown: NLS sequence
KRASEDTTSGSPPKKSSAGPKR

SEQ ID NO: 182 - protein, 16 aa, Unknown
  Description of Unknown: NLS sequence
KRFKRRWMVRKMKTKK

SEQ ID NO: 183 - protein, 16 aa, Homo sapiens
KRGLNSSFETSPKKVK

SEQ ID NO: 184 - protein, 20 aa, Unknown
  Description of Unknown: NLS sequence
KRGNSSIGPNDLSKRKQRKK

SEQ ID NO: 185 - protein, 23 aa, Unknown
  Description of Unknown: NLS sequence
KRIHSVSLSQSQIDPSKKVKRAK

SEQ ID NO: 186 - protein, 15 aa, Homo sapiens
KRKGKLKNKGSKRKK

SEQ ID NO: 187 - protein, 13 aa, Homo sapiens
KRRRRRRREKRKR

SEQ ID NO: 188 - protein, 18 aa, Mus musculus
KRSNDRTYSPEEEKQRRA

SEQ ID NO: 189 - protein, 21 aa, Unknown
  Description of Unknown: NLS sequence
KRTVATNGDASGAHRAKKMSK

SEQ ID NO: 190 - protein, 20 aa, Unknown
  Description of Unknown: NLS sequence
KRVYNKGEDEQEHLPKGKKR

SEQ ID NO: 191 - protein, 18 aa, Unknown
  Description of Unknown: NLS sequence
KSGKAPRRRAVSMDNSNK

SEQ ID NO: 192 - protein, 19 aa, Homo sapiens
KVNFLDMSLDDIIIYKELE

SEQ ID NO: 193 - protein, 15 aa, Tomato yellow leaf curl China virus
KVQHRIAKKTTRRRR

SEQ ID NO: 194 - protein, 8 aa, Unknown
  Description of Unknown: NLS sequence
LSPSLSPL

SEQ ID NO: 195 - protein, 52 aa, Unknown
  Description of Unknown: NLS sequence
MPQNEYIELHRKRYGYRLDYHEKKRKKESREAHERSKKAKKMIGLKAKLYHK

SEQ ID NO: 196 - protein, 10 aa, Unknown
  Description of Unknown: NLS sequence
MVQLRPRASR

SEQ ID NO: 197 - protein, 24 aa, Caenorhabditis elegans
NNKLLAKRRKGGASPKDDPMDDIK

SEQ ID NO: 198 - protein, 20 aa, Unknown
  Description of Unknown: NLS sequence
NYKRPMDGTYGPPAKRHEGE

SEQ ID NO: 199 - protein, 19 aa, Unknown
  Description of Unknown: NLS sequence
PDTKRAKLDSSETTMVKKK

SEQ ID NO: 200 - protein, 7 aa, Unknown
  Description of Unknown: NLS sequence
PEKRTKI

SEQ ID NO: 201 - protein, 8 aa, Unknown
  Description of Unknown: NLS sequence
PGGRGKKK

SEQ ID NO: 202 - protein, 18 aa, Unknown
  Description of Unknown: NLS sequence
PGKMDKGEHRQERRDRPY

SEQ ID NO: 203 - protein, 11 aa, Physarum polycephalum
PKKGDKYDKTD

SEQ ID NO: 204 - protein, 7 aa, Unknown
  Description of Unknown: NLS sequence
PKKKSRK

SEQ ID NO: 205 - protein, 7 aa, Caenorhabditis elegans
PKKNKPE

SEQ ID NO: 206 - protein, 7 aa, Unknown
  Description of Unknown: NLS sequence
PKKRAKV

SEQ ID NO: 207 - protein, 9 aa, Unknown
  Description of Unknown: NLS sequence
PKPKKLKVE

SEQ ID NO: 208 - protein, 7 aa, Unknown
  Description of Unknown: NLS sequence
PKRGRGR

SEQ ID NO: 209 - protein, 9 aa, Mammalian 1 orthobornavirus
PKRRLVDDA

SEQ ID NO: 210 - protein, 7 aa, Unknown
  Description of Unknown: NLS sequence
PKRRRTY

SEQ ID NO: 211 - protein, 6 aa, Unknown
  Description of Unknown: NLS sequence
PLFKRR

SEQ ID NO: 212 - protein, 7 aa, Unknown
  Description of Unknown: NLS sequence
PLRKAKR

SEQ ID NO: 213 - protein, 9 aa, Unknown
  Description of Unknown: NLS sequence
PPAKRKCIF

SEQ ID NO: 214 - protein, 8 aa, Homo sapiens
PPARRRRL

SEQ ID NO: 215 - protein, 8 aa, Unknown
  Description of Unknown: NLS sequence
PPKKKRKV

SEQ ID NO: 216 - protein, 10 aa, Mus musculus
PPNKRMKVKH

SEQ ID NO: 217 - protein, 13 aa, Mammalian 1 orthobornavirus
PPRIYPQLPSAPT

SEQ ID NO: 218 - protein, 13 aa, Unknown
  Description of Unknown: NLS sequence
PQRSPFPKSSVKR

SEQ ID NO: 219 - protein, 8 aa, Mammalian 1 orthobornavirus
PRPRKVPR

SEQ ID NO: 220 - protein, 9 aa, Unknown
  Description of Unknown: NLS sequence
PRRRVQRKR

SEQ ID NO: 221 - protein, 7 aa, Unknown
  Description of Unknown: NLS sequence
PRRVRLK

SEQ ID NO: 222 - protein, 7 aa, Unknown
  Description of Unknown: NLS sequence
PSRKRPR

SEQ ID NO: 223 - protein, 8 aa, Unknown
  Description of Unknown: NLS sequence
PSSKKRKV

SEQ ID NO: 224 - protein, 7 aa, Drosophila melanogaster
PTKKRVK

SEQ ID NO: 225 - protein, 9 aa, Unknown
  Description of Unknown: NLS sequence
QRPGPYDRP

SEQ ID NO: 226 - protein, 18 aa, Unknown
  Description of Unknown: NLS sequence
RGKGGKGLGKGGAKRHRK

SEQ ID NO: 227 - protein, 24 aa, Zea mays
RKAGKGGGGHKTTKKRSAKDEKVP

SEQ ID NO: 228 - protein, 9 aa, Xenopus laevis
RKIKLKRAK

SEQ ID NO: 229 - protein, 9 aa, Xenopus laevis
RKIKRKRAK

SEQ ID NO: 230 - protein, 17 aa, Unknown
  Description of Unknown: NLS sequence
RKKEAPGPREELRSRGR

SEQ ID NO: 231 - protein, 7 aa, Unknown
  Description of Unknown: NLS sequence
RKKRKGK

SEQ ID NO: 232 - protein, 9 aa, Unknown
  Description of Unknown: NLS sequence
RKKRRQRRR

SEQ ID NO: 233 - protein, 25 aa, Homo sapiens
RKKSIPLSIKNLKRKHKRKKNKITR

SEQ ID NO: 234 - protein, 20 aa, Homo sapiens
RKLVKPKNTKMKTKLRTNPY

SEQ ID NO: 235 - protein, 16 aa, Unknown
  Description of Unknown: NLS sequence
RKRLILSDKGQLDWKK

SEQ ID NO: 236 - protein, 7 aa, Homo sapiens
RKRLKSK

SEQ ID NO: 237 - protein, 9 aa, Unknown
  Description of Unknown: NLS sequence
RKRRVRDNM

SEQ ID NO: 238 - protein, 22 aa, Homo sapiens
RKRSPKDKKEKDLDGAGKRRKT

SEQ ID NO: 239 - protein, 22 aa, Homo sapiens
RKRTPRVDGQTGENDMNKRRRK

SEQ ID NO: 240 - protein, 10 aa, Unknown
  Description of Unknown: NLS sequence
RLPVRRRRRR

SEQ ID NO: 241 - protein, 10 aa, Feline immunodeficiency virus
RLRFRKPKSK

SEQ ID NO: 242 - protein, 6 aa, Homo sapiens
RQQRKR

SEQ ID NO: 243 - protein, 16 aa, Mus musculus
RRDLNSSFETSPKKVK

SEQ ID NO: 244 - protein, 8 aa, Arabidopsis thaliana
RRDRAKLR

SEQ ID NO: 245 - protein, 8 aa, Unknown
  Description of Unknown: NLS sequence
RRGDGRRR

SEQ ID NO: 246 - protein, 11 aa, Unknown
  Description of Unknown: NLS sequence
RRGRKRKAEKQ

SEQ ID NO: 247 - protein, 6 aa, Unknown
  Description of Unknown: NLS sequence
RRKKRR

SEQ ID NO: 248 - protein, 19 aa, Mus musculus
RRKRSKSEDMDSVESKRRR

SEQ ID NO: 249 - protein, 6 aa, Unknown
  Description of Unknown: NLS sequence
RRKRSR

SEQ ID NO: 250 - protein, 14 aa, Homo sapiens
RRPKGKTLQKRKPK

SEQ ID NO: 251 - protein, 18 aa, Unknown
  Description of Unknown: NLS sequence
RRRGFERFGPDNMGRKRK

SEQ ID NO: 252 - protein, 15 aa, Unknown
  Description of Unknown: NLS sequence
RRRGKNKVAAQNCRK

SEQ ID NO: 253 - protein, 6 aa, Unknown
  Description of Unknown: NLS sequence
RRRKRR

SEQ ID NO: 254 - protein, 14 aa, Unknown
  Description of Unknown: NLS sequence
RRRQKQKGGASRRR

SEQ ID NO: 255 - protein, 13 aa, Unknown
  Description of Unknown: NLS sequence
RRRREGPRARRRR

SEQ ID NO: 256 - protein, 61 aa, Unknown
  Description of Unknown: NLS sequence
RRTIRLKLVYDKCDRSCKIQKKNRNKCQYCRFHKCLSVGMSHNAIRFGRMPRSEKAKLKAE

SEQ ID NO: 257 - protein, 17 aa, Unknown
  Description of Unknown: NLS sequence
RRVPQRKEVSRCRKCRK

SEQ ID NO: 258 - protein, 32 aa, Human mastadenovirus C
RVGGRRQAVECIEDLLNEPGQPLDLSCKRPRP

SEQ ID NO: 259 - protein, 9 aa, Unknown
  Description of Unknown: NLS sequence
RVVKLRIAP

SEQ ID NO: 260 - protein, 6 aa, Mus musculus
RVVRRR

SEQ ID NO: 261 - protein, 12 aa, Unknown
  Description of Unknown: NLS sequence
SKRKTKISRKTR

SEQ ID NO: 262 - protein, 16 aa, Squash leaf curl virus
SYVKTVPNRTRTYIKL

SEQ ID NO: 263 - protein, 12 aa, Unknown
  Description of Unknown: NLS sequence
TGKNEAKKRKIA

SEQ ID NO: 264 - protein, 30 aa, Unknown
  Description of Unknown: NLS sequence
TLSPASSPSSVSCPVIPASTDESPGSALNI

SEQ ID NO: 265 - protein, 12 aa, Unknown
  Description of Unknown: NLS sequence
VSKKQRTGKKIH

SEQ ID NO: 266 - protein, 9 aa, Unknown
  Description of Unknown: NLS sequence
SPKKKRKVE

SEQ ID NO: 267 - protein, 19 aa, Unknown
  Description of Unknown: NLS sequence
KRTADGSEFESPKKKRKVE

SEQ ID NO: 268 - protein, 9 aa, Unknown
  Description of Unknown: NLS sequence
PAAKRVKLD

SEQ ID NO: 269 - protein, 7 aa, Unknown
  Description of Unknown: NLS sequence
PKKKRKV

SEQ ID NO: 270 - protein, 11 aa, Unknown
  Description of Unknown: NLS sequence
SPKKKRKVEAS

SEQ ID NO: 271 - protein, 16 aa, Unknown
  Description of Unknown: NLS sequence
MAPKKKRKVGIHRGVP

SEQ ID NO: 272 - protein, 16 aa, Artificial Sequence
  Description of Artificial Sequence: Synthetic peptide
KRPAATKKAGQAKKKK

SEQ ID NO: 273 - protein, 29 aa, Artificial Sequence
  Description of Artificial Sequence: Synthetic peptide
PKKKRKVEGADKRTADGSEFESPKKKRKV

SEQ ID NO: 274 - DNA, 62 bp, Artificial Sequence
  Description of Artificial Sequence: Synthetic oligonucleotide
cactcctccccatcctctccctctgtccctctgtccctctgaccctgcactgtcccagcacc

SEQ ID NO: 275 - DNA, 122 bp, Artificial Sequence
  Description of Artificial Sequence: Synthetic polynucleotide
caggacacagccttggatcaggacagagacttgggggccatcctgcccctccaacccgacatgtgtacctcagctttttccctcacttgcatcaataaagcttctgtgtttggaacagctaa

SEQ ID NO: 276 - DNA, 306 bp, Artificial Sequence
  Description of Artificial Sequence: Synthetic polynucleotide
tgcctgtcatacgaaaccgagatactgacagtagaatatggccttctgccaatcgggaagattgtggagaaacggatagaatgcacagtttactctgtcgataacaatggtaacatttatactcagccagttgcccagtggcacgaccggggagagcaggaagtattcgaatactgtctggaggatggaagtctcattagggccactaaggaccacaaatttatgacagtcgatggccagatgctgcctatagacgaaatctttgagcgagagttggacctcatgcgagttgacaaccttcctaat

SEQ ID NO: 277 - protein, 102 aa, Artificial Sequence
  Description of Artificial Sequence: Synthetic polypeptide
CLSYETEILTVEYGLLPIGKIVEKRIECTVYSVDNNGNIYTQPVAQWHDRGEQEVFEYCLEDGSLIRATKDHKFMTVDGQMLPIDEIFERELDLMRVDNLPN

SEQ ID NO: 278 - DNA, 108 bp, Artificial Sequence
  Description of Artificial Sequence: Synthetic polynucleotide
atgatcaagatagctacaaggaagtatcttggcaaacaaaacgtttatgatattggagtcgaaagagatcacaactttgctctgaagaacggattcatagcttctaat

SEQ ID NO: 279 - protein, 36 aa, Artificial Sequence
  Description of Artificial Sequence: Synthetic polypeptide
MIKIATRKYLGKQNVYDIGVERDHNFALKNGFIASN

SEQ ID NO: 280 - DNA, 303 bp, Artificial Sequence
  Description of Artificial Sequence: Synthetic polynucleotide
tgcctgtcttatgataccgagatacttaccgttgaatatggcttcttgcctattggaaagattgtcgaagagagaattgaatgcacagtatatactgtagacaagaatggtttcgtttacacacagcccattgctcaatggcacaatcgcggcgaacaagaagtatttgagtactgtctcgaggatggaagcatcatacgagcaactaaagatcataaattcatgaccactgacgggcagatgttgccaatagatgagatattcgagcggggcttggatctcaaacaagtggatggattgcca

SEQ ID NO: 281 - protein, 101 aa, Artificial Sequence
  Description of Artificial Sequence: Synthetic polypeptide
CLSYDTEILTVEYGFLPIGKIVEERIECTVYTVDKNGFVYTQPIAQWHNRGEQEVFEYCLEDGSIIRATKDHKFMTTDGQMLPIDEIFERGLDLKQVDGLP

SEQ ID NO: 282 - DNA, 159 bp, Artificial Sequence
  Description of Artificial Sequence: Synthetic polynucleotide
atgaagaggactgccgatggatcagagtttgaatctcccaagaagaagaggaaagtaaagataatatctcgaaaaagtcttggtacccaaaatgtctatgatattggagtggagaaagatcacaacttccttctcaagaacggtctcgtagccagcaac

SEQ ID NO: 283 - protein, 53 aa, Artificial Sequence
  Description of Artificial Sequence: Synthetic polypeptide
MKRTADGSEFESPKKKRKVKIISRKSLGTQNVYDIGVEKDHNFLLKNGLVASN

SEQ ID NO: 284 - DNA, 525 bp, Artificial Sequence
  Description of Artificial Sequence: Synthetic polynucleotide
cgttacataacttacggtaaatggcccgcctggctgaccgcccaacgacccccgcccattgacgtcaataatgacgtatgttcccatagtaacgccaatagggactttccattgacgtcaatgggtggagtatttacggtaaactgcccacttggcagtacatcaagtgtatcatatgccaagtacgccccctattgacgtcaatgacggtaaatggcccgcctggcattatgcccagtacatgaccttatgggactttcctacttggcagtacatctacgtattagtcatcgctattaccatggtgatgcggttttggcagtacatcaatgggcgtggatagcggtttgactcacggggatttccaagtctccaccccattgacgtcaatgggagtttgttttggcaccaaaatcaacgggactttccaaaatgtcgtaacaactccgccccattgacgcaaatgggcggtaggcgtgtacggtgggaggtctatataagcagagctcgtttagtgaaccgtca

SEQ ID NO: 285 - DNA, 508 bp, Artificial Sequence
  Description of Artificial Sequence: Synthetic polynucleotide
cgttacataacttacggtaaatggcccgcctggctgaccgcccaacgacccccgcccattgacgtcaataatgacgtatgttcccatagtaacgccaatagggactttccattgacgtcaatgggtggagtatttacggtaaactgcccacttggcagtacatcaagtgtatcatatgccaagtacgccccctattgacgtcaatgacggtaaatggcccgcctggcattatgcccagtacatgaccttatgggactttcctacttggcagtacatctacgtattagtcatcgctattaccatggtgatgcggttttggcagtacatcaatgggcgtggatagcggtttgactcacggggatttccaagtctccaccccattgacgtcaatgggagtttgttttggcaccaaaatcaacgggactttccaaaatgtcgtaacaactccgccccattgacgcaaatgggcggtaggcgtgtacggtgggaggtctatataagcagagct

SEQ ID NO: 286 - DNA, 135 bp, Artificial Sequence
  Description of Artificial Sequence: Synthetic polynucleotide
gatccagacatgataagatacattgatgagtttggacaaaccacaactagaatgcagtgaaaaaaatgctttatttgtgaaatttgtgatgctattgctttatttgtaaccattataagctgcaataaacaagtt

SEQ ID NO: 287 - DNA, 212 bp, Artificial Sequence
  Description of Artificial Sequence: Synthetic polynucleotide
gggcagagcgcacatcgcccacagtccccgagaagttggggggaggggtcggcaattgatccggtgcctagagaaggtggcgcggggtaaactgggaaagtgatgtcgtgtactggctccgcctttttcccgagggtgggggagaaccgtatataagtgcagtagtcgccgtgaacgttctttttcgcaacgggtttgccgccagaacacag

SEQ ID NO: 288 - DNA, 40 bp, Artificial Sequence
  Description of Artificial Sequence: Synthetic oligonucleotide
gacccaagcttggcattccggtactgttggtaaagccacc

SEQ ID NO: 289 - DNA, 720 bp, Artificial Sequence
  Description of Artificial Sequence: Synthetic polynucleotide
atggtgagcaagggcgaggagctgttcaccggggtggtgcccatcctggtcgagctggacggcgacgtaaacggccacaagttcagcgtgtccggcgagggcgagggcgatgccacctacggcaagctgaccctgaagttcatctgcaccaccggcaagctgcccgtgccctggcccaccctcgtgaccaccctgacctacggcgtgcagtgcttcagccgctaccccgaccacatgaagcagcacgacttcttcaagtccgccatgcccgaaggctacgtccaggagcgcaccatcttcttcaaggacgacggcaactacaagacccgcgccgaggtgaagttcgagggcgacaccctggtgaaccgcatcgagctgaagggcatcgacttcaaggaggacggcaacatcctggggcacaagctggagtacaactacaacagccacaacgtctatatcatggccgacaagcagaagaacggcatcaaggtgaacttcaagatccgccacaacatcgaggacggcagcgtgcagctcgccgaccactaccagcagaacacccccatcggcgacggccccgtgctgctgcccgacaaccactacctgagcacccagtccgccctgagcaaagaccccaacgagaagcgcgatcacatggtcctgctggagttcgtgaccgccgccgggatcactctcggcatggacgagctgtacaagtaa

SEQ ID NO: 290 - DNA, 853 bp, Artificial Sequence
  Description of Artificial Sequence: Synthetic polynucleotide
atggtgagcaagggcgaggagctgttcaccggggtggtgcccatcctggtcgagctggacggcgacgtaaacggccacaagttcagcgtgtccggcgagggcgagggcgatgccacctacggcaagctgaccctgaagttcatctgcaccaccggcaagctgcccgtgccctggcccaccctcgtgaccaccctgacctacggcgtgcagtgcttcagccgctaccccgaccacatgaagcagcacgacttcttcaagtccgccatgcccgaaggctacgtccaggagcgcaccatcttcttcaaggacgacggcaactacaagacccgcgccgaggtgaagttcgagggcgacaccctggtgaaccgcatcgagctgaagggcatcgacttcaaggaggacggcaacatcctggggcacaagctggagtacaactacaacagccacaacgtctatatcatggccgacaagcagaagaacggcatcaaggtgaacttcaagatccgccacaacatcgaggacggcagcgtgcagctcgccgaccactaccagcagaacacccccatcggcgacggccccgtgctgctgcccgacaaccactacctgtggagagaaaggcaaagtggatgtcagtaagaccaataggtgcctatcagaaacgcaagagtcttctctgtctcgacaagcccagtttctattggtctccttaaacctgtcttgtaaccttgatacttacctgagcacccagtccgccctgagcaaagaccccaacgagaagcgcgatcacatggtcctgctggagttcgtgaccgccgccgggatcactctcggcatggacgagctgtacaagtaa

SEQ ID NO: 291 - DNA, 133 bp, Artificial Sequence
  Description of Artificial Sequence: Synthetic polynucleotide
gtaagtatcaaggttacaagacaggtttaaggagaccaatagaaactgggcttgtcgagacagagaagactcttgcgtttctgataggcacctattggtcttactgacatccactttgcctttctctccacag

SEQ ID NO: 292 - DNA, 49 bp, Artificial Sequence
  Description of Artificial Sequence: Synthetic oligonucleotide
cggcaataaaaagacagaataaaacgcacgggtgttgggtcgtttgttc

SEQ ID NO: 293 - DNA, 1168 bp, Artificial Sequence
  Description of Artificial Sequence: Synthetic polynucleotide
gggcagagcgcacatcgcccacagtccccgagaagttggggggaggggtcggcaattgatccggtgcctagagaaggtggcgcggggtaaactgggaaagtgatgtcgtgtactggctccgcctttttcccgagggtgggggagaaccgtatataagtgcagtagtcgccgtgaacgttctttttcgcaacgggtttgccgccagaacacaggacccaagcttggcattccggtactgttggtaaagccaccatggtgagcaagggcgaggagctgttcaccggggtggtgcccatcctggtcgagctggacggcgacgtaaacggccacaagttcagcgtgtccggcgagggcgagggcgatgccacctacggcaagctgaccctgaagttcatctgcaccaccggcaagctgcccgtgccctggcccaccctcgtgaccaccctgacctacggcgtgcagtgcttcagccgctaccccgaccacatgaagcagcacgacttcttcaagtccgccatgcccgaaggctacgtccaggagcgcaccatcttcttcaaggacgacggcaactacaagacccgcgccgaggtgaagttcgagggcgacaccctggtgaaccgcatcgagctgaagggcatcgacttcaaggaggacggcaacatcctggggcacaagctggagtacaactacaacagccacaacgtctatatcatggccgacaagcagaagaacggcatcaaggtgaacttcaagatccgccacaacatcgaggacggcagcgtgcagctcgccgaccactaccagcagaacacccccatcggcgacggccccgtgctgctgcccgacaaccactacctgtggagagaaaggcaaagtggatgtcagtaagaccaataggtgcctatcagaaacgcaagagtcttctctgtctcgacaagcccagtttctattggtctccttaaacctgtcttgtaaccttgatacttacctgagcacccagtccgccctgagcaaagaccccaacgagaagcgcgatcacatggtcctgctggagttcgtgaccgccgccgggatcactctcggcatggacgagctgtacaagtaaagcggccgggggatcggcaataaaaagacagaataaaacgcacgggtgttgggtcgtttgttc

SEQ ID NO: 294 - DNA, 1035 bp, Artificial Sequence
  Description of Artificial Sequence: Synthetic polynucleotide
gggcagagcgcacatcgcccacagtccccgagaagttggggggaggggtcggcaattgatccggtgcctagagaaggtggcgcggggtaaactgggaaagtgatgtcgtgtactggctccgcctttttcccgagggtgggggagaaccgtatataagtgcagtagtcgccgtgaacgttctttttcgcaacgggtttgccgccagaacacaggacccaagcttggcattccggtactgttggtaaagccaccatggtgagcaagggcgaggagctgttcaccggggtggtgcccatcctggtcgagctggacggcgacgtaaacggccacaagttcagcgtgtccggcgagggcgagggcgatgccacctacggcaagctgaccctgaagttcatctgcaccaccggcaagctgcccgtgccctggcccaccctcgtgaccaccctgacctacggcgtgcagtgcttcagccgctaccccgaccacatgaagcagcacgacttcttcaagtccgccatgcccgaaggctacgtccaggagcgcaccatcttcttcaaggacgacggcaactacaagacccgcgccgaggtgaagttcgagggcgacaccctggtgaaccgcatcgagctgaagggcatcgacttcaaggaggacggcaacatcctggggcacaagctggagtacaactacaacagccacaacgtctatatcatggccgacaagcagaagaacggcatcaaggtgaacttcaagatccgccacaacatcgaggacggcagcgtgcagctcgccgaccactaccagcagaacacccccatcggcgacggccccgtgctgctgcccgacaaccactacctgagcacccagtccgccctgagcaaagaccccaacgagaagcgcgatcacatggtcctgctggagttcgtgaccgccgccgggatcactctcggcatggacgagctgtacaagtaaagcggccgggggatcggcaataaaaagacagaataaaacgcacgggtgttgggtcgtttgttc

SEQ ID NO: 295 - protein, 239 aa, Artificial Sequence
  Description of Artificial Sequence: Synthetic polypeptide
MVSKGEELFTGVVPILVELDGDVNGHKFSVSGEGEGDATYGKLTLKFICTTGKLPVPWPTLVTTLTYGVQCFSRYPDHMKQHDFFKSAMPEGYVQERTIFFKDDGNYKTRAEVKFEGDTLVNRIELKGIDFKEDGNILGHKLEYNYNSHNVYIMADKQKNGIKVNFKIRHNIEDGSVQLADHYQQNTPIGDGPVLLPDNHYLSTQSALSKDPNEKRDHMVLLEFVTAAGITLGMDELYK

SEQ ID NO: 296 - DNA, 191 bp, Artificial Sequence
  Description of Artificial Sequence: Synthetic polynucleotide
tgtagtctcccctcccccagcctgaaacctgcttgctcaggggtggagcttcccgctcatcgctctgccacgcccactgctggaacctgcggagccacacacgtgcacctttctactggaccagagattattcggcgggaatcgggtcccctcccccttccttcataactagtgtcccaacaataaaattt

SEQ ID NO: 297 - DNA, 12 bp, Artificial Sequence
  Description of Artificial Sequence: Synthetic oligonucleotide
gagctttgatca

SEQ ID NO: 298 - DNA, 10 bp, Artificial Sequence
  Description of Artificial Sequence: Synthetic oligonucleotide
gctttgatca

SEQ ID NO: 299 - DNA, 116 bp, Artificial Sequence
  Description of Artificial Sequence: Synthetic polynucleotide
gaatgaatttgtcttggctccgtttcttctttcgccccgtctagattcctctcttacagctcgagtggccttctcagtcgaaccgttcacgttgcgagctgctggcggccgcaaca

SEQ ID NO: 300 - DNA, 319 bp, Artificial Sequence
  Description of Artificial Sequence: Synthetic polynucleotide
tgtagtctcccctcccccagcctgaaacctgcttgctcaggggtggagcttcccgctcatcgctctgccacgcccactgctggaacctgcggagccacacacgtgcacctttctactggaccagagattattcggcgggaatcgggtcccctcccccttccttcataactagtgtcccaacaataaaatttgagctttgatcagaatgaatttgtcttggctccgtttcttctttcgccccgtctagattcctctcttacagctcgagtggccttctcagtcgaaccgttcacgttgcgagctgctggcggccgcaaca

SEQ ID NO: 301 - DNA, 33 bp, Artificial Sequence
  Description of Artificial Sequence: Synthetic oligonucleotide
ttttggcgccagaactgggacctgaagaatggc

SEQ ID NO: 302 - DNA, 18 bp, Artificial Sequence
  Description of Artificial Sequence: Synthetic oligonucleotide
tggcgccagaactgggac

SEQ ID NO: 303 - DNA, 1737 bp, Artificial Sequence
  Description of Artificial Sequence: Synthetic polynucleotide
atggatcaggcggttgcccatagttttcaggagttgtttcaggccagaggagtaaggcttgaagtacaattagtaaaaaattttttaggtaagatagatagctgttgcccatggttcaaggaagaagaaacactagattgtggaacctgggagaaagttggtgaggccttaaaaatcactcaggcagataattttaccctaggcctctgggcactcataaatgatgcaataaaagatgccacttccccagggctaagttgcccccaggcggagcttgtggtatctcaggaggagtgcctgtcagagagggcctcctcagaaaaagatcttcttaactcaaaaattgataaatgtggaaactcggatgaaaaactgatttttaacaaaaatcactcagatagaggagctgcccattaccttaatgagaattggtcctcttgtgaatctcctgctcaacctgtagtccccacttcgggaggtgccactcatagggacacacgactaagcgagttagagtttgagattaagcttcagaggctgactaatgagcttcgggaactaaaaaagatgtcagaagcggagaagagtaactcttctgtagttcaccaggtgccgctagaaaaggttgtgagtcaggctcatgggaaaggacagaatatctctaatacgctagcctttcctgtggttgaggtagttgatcagcaagatactaggggcagacattaccagaccttagatttcaagttgataaaagagttaaaggcggctgttgtgcaatatggcccttcagccccattcactcaagcattactggacacagttgtggagtcacacttaacccctttagattggaagactctttctaaggctaccctgtcaggaggagattttttgctttgggattctgaatggcgagacgccagtaagaaaactgctgcttctaacgctcaggctggtaattcagactgggatagcaacatgcttttaggagagggcccttatgagggacagacaaatcagattgattttcccgttgcagtgtacgcgcaaattgcgacggccgcacgccgtgcttggggaaggttgccagtcaaaggagagattggtggaagtttagctagcattcggcagagttctgatgaaccatatcaggattttgtggacaggctattgatttcagctagtagaatccttggaaatccggacacgggaagtcctttcgttatgcaattggcttatgagaatgctaacgcaatttgccgagctgcgattcaaccgcataagggaacgacagatttggcgggatatgtccgtctttgcgcagacatcgggccttcctgcgagaccttgcagggaacccacgcgcaggcaatgttctctaggaaacgagggaatagtgcatgctttaaatgtggaagtttagatcattttagaattgattgtcctcagaacaagggcgccgaggttagacaaacaggccgtgccccgggaatatgtccccgatgtggaaagggccgccactgggcgaaagattgcaagcataaaacgagggttttgagccgcccggtgccgggaaacgaggaaaggggtcagccccaggccccaagttactcaaagaagacagcttatggggctctaaatctgctgcccagccaacaagatcagttcttgagcttgtcaggtcaaacccaggaaacgcaagactggacctctgttccactgtccatgcagcattaa

SEQ ID NO: 304 - DNA, 957 bp, Artificial Sequence
  Description of Artificial Sequence: Synthetic polynucleotide
aacgagggttttgagccgcccggtgccgggaaacgaggaaaggggtcagccccaggccccaagttactcaaagaagacagcttatggggctctaaatctgctgcccagccaacaagatcagttcttgagcttgtcaggtcaaacccaggaaacgcaagactggacctctgttccactgtccatgcagcattaaccccagaagtgggagtccaaactctgcctaccggagtctttggaccactacctgtaggaacctgtggttttctcttaggacgaagcagttctattgtagaaggcctgcagatttatccaggtgttataagtaatgattatgagggagaaattaaaatcatagccgcttgccctcgtggtgctataactatacccgctaatcagaaaattgctcaacttaccttgatccccttgcgctggtcactatctaaattctctaaaaatgaagaaggacagattaactttgactcctctggcgtaaattgggtgaaatctatcactaatcagagacctaaccttaaattgattcttgatggaaaaagctttgaaggattaatagataccggggccgatgtaaccattattagagggcaggactggccctcaaactggcccctgtctgtttccttgactcaccttcaaggaattggttatgccagtaacccaaaacgtagttccaaattgctaacctggagagatgaggatggaaaatcaggaaatattcagccgtatgttatgcaaaatttgcctgtaaccctgtggggaagagatctgttgtcacagatgggcgttatcctgtgcagttctaaggaaatggtgactgaacagacgttcaggcagggacccctgcctgatcgtggactaataaagaagggacagaaaattaagacttttgaagatcttaaaccccactctaacgtgagaggtttaaagtattttcagtag

SEQ ID NO: 305 - DNA, 2607 bp, Artificial Sequence
  Description of Artificial Sequence: Synthetic polynucleotide
cgtgagaggtttaaagtattttcagtagtggccgctgtcttgcctgcatcccacgccgaaaaaattcaatggcgtaatgatattccggtgtgggtagatcagtggtctttacctaaagagaaaatagaggccgcttctctgctagtgcaggagcagttagaagcaggacatttggtggagtctcattctccctggaatacacccattttcattatcaggaagaaatcgggaaaatggagactgttgcaagatttaagaaaggttaatgaaaccatggtacttatgggaactttacaaccggggctcccctccccagtagccattcctaagggatactataagattgttatagatttgaaagattgtttctttaccatccctttgcatccagaggattgtgagagatttgcttttagtgttccttctgtaaatttcaaggaacccatgaaaagatatcaatggacagttctcccgcaggggatggctaatagtcccaccttatgtcaaaagtttgtggcaaaggcaattcagcctgttagacaacaatggccaaatatttacatcattcatttcacagatgatgttttgatggcgggaaaggacccccaagatttgcttttgtgttatggagacttacgaaaggccctggctgataagggattacaaattgcttctgaaaagatacaaactcaggatccttataattatttgggttttagactcactgaccaagctgtttttcaccagaaaattgttattcgtagagataacttaaggaccttaaatgattttcaaaaattgttaggtgatataaactggcttcgcccctatctaaagcttactacaggggagttgaaacctttatttgatattcttaaagggagttctgatcctacttcccctagatccctaacctcagaaggtttactggccttacagctagtggaaaaggctattgaagaacagtttgtcacttacatagattactccctgccgctgcacctgttaatttttaacacgactcatgtgcctacgggattgctatggcaaaaatttcctataatgtggatacattcaaggatttctcccaaacgtaatattttgccatatcatgaagcagtggctcagatgattatcactggaagaaggcaggcattgacttattttggaaaggagccagatatcattgtccagccttacagcgtgagtcaggacacttggctgaaacagcatagtacagattggttgcttgcacaattagggtttgaaggaactatagatagccactacccccaagataggttgataaaattcttaaatgtacatgatatgatatttcctaagatgacttccttacagcctttaaataatgctctattgatttttactgatggctcctctaaagggcgagctggatatcttattagtaatcaacaggttatcgtagagactcctggtctctcggctcagctcgccgaactaacagcagtactgaaggtttttcagtctgtacaggaggcttttaatatttttactgacagtttatatgttgctcagtcagtacccttattggaaacctgtggtacttttaacttcaatacgccgtcaggatctttattttcagaattacaaaacatcattctcgcccggaaaaatccgttttatattggccacatacggtctcactctggtcttcctggacctctggcagagggtaataattgcattgacagagctctaataggagaagccttagtttcagatcgggttgctttggcccaacgtgatcatgaaaggtttcatctctctagccataccctaaggctccgacataagatcaccaaggagcaagcgagaatgattgtaaaacaatgtcctaaatgtattactttatctccagtgccgcatctaggagttaatcctagaggccttatgcctaatcatatttggcaaatggatataacccattatgcagaatttggaaaactaaaatatatacatgtttgcattgatacttgttcaggatttctctttgcttctctgcatacaggagaagcttcaaaaaacgtaattgatcattgcctacaagcatttaatgccatgggattacctaaacttattaagacagacaatgggccatcttattccagtaaaaactttatttcattctgtaaagaattcggtattaaacataaaactggaattccttacaaccccatgggacaaggaatagttgaacgtgctcatcgcaccttaaagaattggctctttaagacaaaagaggggcagctatatcccccaaggtctccaaaggcccaccttgccttcaccttatttgtcctaaatttcttgcacaccgatatcaagggccagtctgcagcggatcgccactggcatccagttacttctaattcttatgcattggtaaaatggaaggaccccctgactaatgaatggaagggtccagatccagttctaatttggggtagaggctcagtttgtgttttttcacgagatgaagatggagcacggtggctgccagagagattaattcgtcagacgaacacagattctgactcttctggtaagtatcattctaaagactaa

SEQ ID NO: 306 - DNA, 288 bp, Artificial Sequence
  Description of Artificial Sequence: Synthetic polynucleotide
agagagatgctaagaggaacgctgctttggagctccacaggaaaggatcttcgtatcggacatcggagcaacggacaggtacacatgctagcgctagcttaaaatttcagttttgtaaagtgttgctgaggatgtggtaggatacgaattaagcttgaatcagtgctaacccaacgctggttctgcttgggtcagcagcgtgttaatcggaactagaaacggaaacaggcaggttagccgcagctttttaggaagctgcttaggtggaagaagaaagggtttaaagtc

SEQ ID NO: 307 - DNA, 1403 bp, Artificial Sequence
  Description of Artificial Sequence: Synthetic polynucleotide
aattccttttgtgcttaaaattcagctgagagcaacagctctcaaagctgttctccagctactctctgagccagctcccgacaggaggccggagactagcctcagctttacaatttgcatttaaataaagtacctagacttccccgaaaaaagttctgcttttctactttctcactgtctttcaagattttgtctttcaagcaggtaaatcaacattctcgaggcggaccagcggatgtgcatccccgcccccctagagcactcaggtggcagctgttatccccagtctcaggacattccagcatgtggccttcagtctgagttaaaaattaggtttacccagaggactagaatagtagatatttctatattaataaagattggtttttattttgatagacaggcttagccccttagctgacctctggcttttcacccttgctgttactgcaaggtgtctttagctcaataaggctgtggaaaaaaacagggatgaggaggaacggctcccagctcctattttagccacaaatcgtggtgttactaacgacataattcttgcttaggctttgctaaatctgaggttgataattctcctttaggagctgcacagcgctcagaactgtgcatactgatttgtgatggtacaaattcagtatgggcatcgcttggtgcagatggaggtactgcaaggaaaggtcccagcttgaccatttctgagtttcctgtgagataaacccggtttgaaagaggttggtaccaaattatatatccctcggctctacctcgcctccccaaaaggtaccagagccacaggtgtggattttaacagaatccacgggaggaatcgggtccatgtccacccaagccaaggttaaaagcccactcatctacggatgagaaaatcatttgatcacctcagttaagcgctgccttattttaacttaattaataggggggagagagattggagacttactattgaaagggcaagcccttcactgcctcccacccaaataaaaaagccaattggccttgtactacagagctggccggaccccttatccctgttacccaccaatcatccaaaaatgcggaggaatatcaacttagtgttattcttattatagtgtatttcacacttgttcagtcaaacttagccagagttccaacgccctacttaaaattcaactagaaagttacctaccaagtactaattagcattataaagtcagagcctacagctccaggcttttcagttagttgtttactaagataagaaaagacagtcttagccagatacagtttaccataataaaagttaaagaatcccagggaagcaagttttttcttttagccctagattccaggcagaactattgagcatagataatttttccccc

SEQ ID NO: 308 - DNA, 33 bp, Artificial Sequence
  Description of Artificial Sequence: Synthetic oligonucleotide
ttttagcgactaaacacatcactgaagaatccg

SEQ ID NO: 309 - DNA, 18 bp, Artificial Sequence
  Description of Artificial Sequence: Synthetic oligonucleotide
tagcgactaaacacatca

SEQ ID NO: 310 - DNA, 50 bp, Artificial Sequence
  Description of Artificial Sequence: Synthetic oligonucleotide
tcaggccagctttttctttttttttaattttgttaataaaagggaggaga

SEQ ID NO: 311 - DNA, 13 bp, Artificial Sequence
  Description of Artificial Sequence: Synthetic oligonucleotide
aaaagggaggaga

SEQ ID NO: 312 - DNA, 5947 bp, Artificial Sequence
  Description of Artificial Sequence: Synthetic polynucleotide
gaattcgagcttgcatgcctgcaggtcgttacataacttacggtaaatggcccgcctggctgaccgcccaacgacccccgcccattgacgtcaataatgacgtatgttcccatagtaacgccaatagggactttccattgacgtcaatgggtggagtatttacggtaaactgcccacttggcagtacatcaagtgtatcatatgccaagtacgccccctattgacgtcaatgacggtaaatggcccgcctggcattatgcccagtacatgaccttatgggactttcctacttggcagtacatctacgtattagtcatcgctattaccatggtgatgcggttttggcagtacatcaatgggcgtggatagcggtttgactcacggggatttccaagtctccaccccattgacgtcaatgggagtttgttttggcaccaaaatcaacgggactttccaaaatgtcgtaacaactccgccccattgacgcaaatgggcggtaggcgtgtacggtgggaggtctatataagcagagctcgtttagtgaaccgtcagatcgccgccaccatggatcaggcggttgcccatagttttcaggagttgtttcaggccagaggagtaaggcttgaagtacaattagtaaaaaattttttaggtaagatagatagctgttgcccatggttcaaggaagaagaaacactagattgtggaacctgggagaaagttggtgaggccttaaaaatcactcaggcagataattttaccctaggcctctgggcactcataaatgatgcaataaaagatgccacttccccagggctaagttgcccccaggcggagcttgtggtatctcaggaggagtgcctgtcagagagggcctcctcagaaaaagatcttcttaactcaaaaattgataaatgtggaaactcggatgaaaaactgatttttaacaaaaatcactcagatagaggagctgcccattaccttaatgagaattggtcctcttgtgaatctcctgctcaacctgtagtccccacttcgggaggtgccactcatagggacacacgactaagcgagttagagtttgagattaagcttcagaggctgactaatgagcttcgggaactaaaaaagatgtcagaagcggagaagagtaactcttctgtagttcaccaggtgccgctagaaaaggttgtgagtcaggctcatgggaaaggacagaatatctctaatacgctagcctttcctgtggttgaggtagttgatcagcaagatactaggggcagacattaccagaccttagatttcaagttgataaaagagttaaaggcggctgttgtgcaatatggcccttcagccccattcactcaagcattactggacacagttgtggagtcacacttaacccctttagattggaagactctttctaaggctaccctgtcaggaggagattttttgctttgggattctgaatggcgagacgccagtaagaaaactgctgcttctaacgctcaggctggtaattcagactgggatagcaacatgcttttaggagagggcccttatgagggacagacaaatcagattgattttcccgttgcagtgtacgcgcaaattgcgacggccgcacgccgtgcttggggaaggttgccagtcaaaggagagattggtggaagtttagctagcattcggcagagttctgatgaaccatatcaggattttgtggacaggctattgatttcagctagtagaatccttggaaatccggacacgggaagtcctttcgttatgcaattggcttatgagaatgctaacgcaatttgccgagctgcgattcaaccgcataagggaacgacagatttggcgggatatgtccgtctttgcgcagacatcgggccttcctgcgagaccttgcagggaacccacgcgcaggcaatgttctctaggaaacgagggaatagtgcatgctttaaatgtggaagtttagatcattttagaattgattgtcctcagaacaagggcgccgaggttagacaaacaggccgtgccccgggaatatgtccccgatgtggaaagggccgccactgggcgaaagattgcaagcataaaacgagggttttgagccgcccggtgccgggaaacgaggaaaggggtcagccccaggccccaagttactcaaagaagacagcttatggggctctaaatctgctgcccagccaacaagatcagttcttgagcttgtcaggtcaaacccaggaaacgcaagactggacctctgttccactgtccatgcagcattaaccccagaagtgggagtccaaactctgcctaccggagtctttggaccactacctgtaggaacctgtggttttctcttaggacgaagcagttctattgtagaaggcctgcagatttatccaggtgttataagtaatgattatgagggagaaattaaaatcatagccgcttgccctcgtggtgctataactatacccgctaatcagaaaattgctcaacttaccttgatccccttgcgctggtcactatctaaattctctaaaaatgaagaaggacagattaactttgactcctctggcgtaaattgggtgaaatctatcactaatcagagacctaaccttaaattgattcttgatggaaaaagctttgaaggattaatagataccggggccgatgtaaccattattagagggcaggactggccctcaaactggcccctgtctgtttccttgactcaccttcaaggaattggttatgccagtaacccaaaacgtagttccaaattgctaacctggagagatgaggatggaaaatcaggaaatattcagccgtatgttatgcaaaatttgcctgtaaccctgtggggaagagatctgttgtcacagatgggcgttatcctgtgcagttctaaggaaatggtgactgaacagacgttcaggcagggacccctgcctgatcgtggactaataaagaagggacagaaaattaagacttttgaagatcttaaaccccactctaacgtgagaggtttaaagtattttcagtagtgtaagcggccgcaacaggggatccagacatgataagatacattgatgagtttggacaaaccacaactagaatgcagtgaaaaaaatgctttatttgtgaaatttgtgatgctattgctttatttgtaaccattataagctgcaataaacaagttaacaacaacaattgcattcattttatgtttcaggttcagggggaggtgtgggaggttttttcggatcctctagagtcgacctgcaggcatgcaagcttggcgtaatcatggtcatagctgtttcctgtgtgaaattgttatccgctcacaattccacacaacatacgagccggaagcataaagtgtaaagcctggggtgcctaatgagtgagctaactcacattaattgcgttgcgctcactgcccgctttccagtcgggaaacctgtcgtgccagctgcattaatgaatcggccaacgcgcggggagaggcggtttgcgtattgggcgctcttccgcttcctcgctcactgactcgctgcgctcggtcgttcggctgcggcgagcggtatcagctcactcaaaggcggtaatacggttatccacagaatcaggggataacgcaggaaagaacatgtgagcaaaaggccagcaaaaggccaggaaccgtaaaaaggccgcgttgctggcgtttttccataggctccgcccccctgacgagcatcacaaaaatcgacgctcaagtcagaggtggcgaaacccgacaggactataaagataccaggcgtttccccctggaagctccctcgtgcgctctcctgttccgaccctgccgcttaccggatacctgtccgcctttctcccttcgggaagcgtggcgctttctcatagctcacgctgtaggtatctcagttcggtgtaggtcgttcgctccaagctgggctgtgtgcacgaaccccccgttcagcccgaccgctgcgccttatccggtaactatcgtcttgagtccaacccggtaagacacgacttatcgccactggcagcagccactggtaacaggattagcagagcgaggtatgtaggcggtgctacagagttcttgaagtggtggcctaactacggctacactagaaggacagtatttggtatctgcgctctgctgaagccagttaccttcggaaaaagagttggtagctcttgatccggcaaacaaaccaccgctggtagcggtggtttttttgtttgcaagcagcagattacgcgcagaaaaaaaggatctcaagaagatcctttgatcttttctacggggtctgacgctcagtggaacgaaaactcacgttaagggattttggtcatgagattatcaaaaaggatcttcacctagatccttttaaattaaaaatgaagttttaaatcaatctaaagtatatatgagtaaacttggtctgacagttaccaatgcttaatcagtgaggcacctatctcagcgatctgtctatttcgttcatccatagttgcctgactccccgtcgtgtagataactacgatacgggagggcttaccatctggccccagtgctgcaatgataccgcgagacccacgctcaccggctccagatttatcagcaataaaccagccagccggaagggccgagcgcagaagtggtcctgcaactttatccgcctccatccagtctattaattgttgccgggaagctagagtaagtagttcgccagttaatagtttgcgcaacgttgttgccattgctacaggcatcgtggtgtcacgctcgtcgtttggtatggcttcattcagctccggttcccaacgatcaaggcgagttacatgatcccccatgttgtgcaaaaaagcggttagctccttcggtcctccgatcgttgtcagaagtaagttggccgcagtgttatcactcatggttatggcagcactgcataattctcttactgtcatgccatccgtaagatgcttttctgtgactggtgagtactcaaccaagtcattctgagaatagtgtatgcggcgaccgagttgctcttgcccggcgtcaatacgggataataccgcgccacatagcagaactttaaaagtgctcatcattggaaaacgttcttcggggcgaaaactctcaaggatcttaccgctgttgagatccagttcgatgtaacccactcgtgcacccaactgatcttcagcatcttttactttcaccagcgtttctgggtgagcaaaaacaggaaggcaaaatgccgcaaaaaagggaataagggcgacacggaaatgttgaatactcatactcttcctttttcaatattattgaagcatttatcagggttattgtctcatgagcggatacatatttgaatgtatttagaaaaataaacaaataggggttccgcgcacatttccccgaaaagtgccacctgacgtctaagaaaccattattatcatgacattaacctataaaaataggcgtatcacgaggccctttcgtctcgcgcgtttcggtgatgacggtgaaaacctctgacacatgcagctcccggagacggtcacagcttgtctgtaagcggatgccgggagcagacaagcccgtcagggcgcgtcagcgggtgttggcgggtgtcggggctggcttaactatgcggcatcagagcagattgtactgagagtgcaccatatgcggtgtgaaataccgcacagatgcgtaaggagaaaataccgcatcaggcgccattcgccattcaggctgcgcaactgttgggaagggcgatcggtgcgggcctcttcgctattacgccagctggcgaaagggggatgtgctgcaaggcgattaagttgggtaacgccagggttttcccagtcacgacgttgtaaaacgacggccagt

SEQ ID NO: 313 - DNA, 8521 bp, Artificial Sequence
  Description of Artificial Sequence: Synthetic polynucleotide
gaattcgagcttgcatgcctgcaggtcgttacataacttacggtaaatggcccgcctggctgaccgcccaacgacccccgcccattgacgtcaataatgacgtatgttcccatagtaacgccaatagggactttccattgacgtcaatgggtggagtatttacggtaaactgcccacttggcagtacatcaagtgtatcatatgccaagtacgccccctattgacgtcaatgacggtaaatggcccgcctggcattatgcccagtacatgaccttatgggactttcctacttggcagtacatctacgtattagtcatcgctattaccatggtgatgcggttttggcagtacatcaatgggcgtggatagcggtttgactcacggggatttccaagtctccaccccattgacgtcaatgggagtttgttttggcaccaaaatcaacgggactttccaaaatgtcgtaacaactccgccccattgacgcaaatgggcggtaggcgtgtacggtgggaggtctatataagcagagctcgtttagtgaaccgtcagatcgccgccaccatggatcaggcggttgcccatagttttcaggagttgtttcaggccagaggagtaaggcttgaagtacaattagtaaaaaattttttaggtaagatagatagctgttgcccatggttcaaggaagaagaaacactagattgtggaacctgggagaaagttggtgaggccttaaaaatcactcaggcagataattttaccctaggcctctgggcactcataaatgatgcaataaaagatgccacttccccagggctaagttgcccccaggcggagcttgtggtatctcaggaggagtgcctgtcagagagggcctcctcagaaaaagatcttcttaactcaaaaattgataaatgtggaaactcggatgaaaaactgatttttaacaaaaatcactcagatagaggagctgcccattaccttaatgagaattggtcctcttgtgaatctcctgctcaacctgtagtccccacttcgggaggtgccactcatagggacacacgactaagcgagttagagtttgagattaagcttcagaggctgactaatgagcttcgggaactaaaaaagatgtcagaagcggagaagagtaactcttctgtagttcaccaggtgccgctagaaaaggttgtgagtcaggctcatgggaaaggacagaatatctctaatacgctagcctttcctgtggttgaggtagttgatcagcaagatactaggggcagacattaccagaccttagatttcaagttgataaaagagttaaaggcggctgttgtgcaatatggcccttcagccccattcactcaagcattactggacacagttgtggagtcacacttaacccctttagattggaagactctttctaaggctaccctgtcaggaggagattttttgctttgggattctgaatggcgagacgccagtaagaaaactgctgcttctaacgctcaggctggtaattcagactgggatagcaacatgcttttaggagagggcccttatgagggacagacaaatcagattgattttcccgttgcagtgtacgcgcaaattgcgacggccgcacgccgtgcttggggaaggttgccagtcaaaggagagattggtggaagtttagctagcattcggcagagttctgatgaaccatatcaggattttgtggacaggctattgatttcagctagtagaatccttggaaatccggacacgggaagtcctttcgttatgcaattggcttatgagaatgctaacgcaatttgccgagctgcgattcaaccgcataagggaacgacagatttggcgggatatgtccgtctttgcgcagacatcgggccttcctgcgagaccttgcagggaacccacgcgcaggcaatgttctctaggaaacgagggaatagtgcatgctttaaatgtggaagtttagatcattttagaattgattgtcctcagaacaagggcgccgaggttagacaaacaggccgtgccccgggaatatgtccccgatgtggaaagggccgccactgggcgaaagattgcaagcataaaacgagggttttgagccgcccggtgccgggaaacgaggaaaggggtcagccccaggccccaagttactcaaagaagacagcttatggggctctaaatctgctgcccagccaacaagatcagttcttgagcttgtcaggtcaaacccaggaaacgcaagactggacctctgttccactgtccatgcagcattaaccccagaagtgggagtccaaactctgcctaccggagtctttggaccactacctgtaggaacctgtggttttctcttaggacgaagcagttctattgtagaaggcctgcagatttatccaggtgttataagtaatgattatgagggagaaattaaaatcatagccgcttgccctcgtggtgctataactatacccgctaatcagaaaattgctcaacttaccttgatccccttgcgctggtcactatctaaattctctaaaaatgaagaaggacagattaactttgactcctctggcgtaaattgggtgaaatctatcactaatcagagacctaaccttaaattgattcttgatggaaaaagctttgaaggattaatagataccggggccgatgtaaccattattagagggcaggactggccctcaaactggcccctgtctgtttccttgactcaccttcaaggaattggttatgccagtaacccaaaacgtagttccaaattgctaacctggagagatgaggatggaaaatcaggaaatattcagccgtatgttatgcaaaatttgcctgtaaccctgtggggaagagatctgttgtcacagatgggcgttatcctgtgcagttctaaggaaatggtgactgaacagacgttcaggcagggacccctgcctgatcgtggactaataaagaagggacagaaaattaagacttttgaagatcttaaaccccactctaacgtgagaggtttaaagtattttcagtagtggccgctgtcttgcctgcatcccacgccgaaaaaattcaatggcgtaatgatattccggtgtgggtagatcagtggtctttacctaaagagaaaatagaggccgcttctctgctagtgcaggagcagttagaagcaggacatttggtggagtctcattctccctggaatacacccattttcattatcaggaagaaatcgggaaaatggagactgttgcaagatttaagaaaggttaatgaaaccatggtacttatgggaactttacaaccggggctcccctccccagtagccattcctaagggatactataagattgttatagatttgaaagattgtttctttaccatccctttgcatccagaggattgtgagagatttgcttttagtgttccttctgtaaatttcaaggaacccatgaaaagatatcaatggacagttctcccgcaggggatggctaatagtcccaccttatgtcaaaagtttgtggcaaaggcaattcagcctgttagacaacaatggccaaatatttacatcattcatttcacagatgatgttttgatggcgggaaaggacccccaagatttgcttttgtgttatggagacttacgaaaggccctggctgataagggattacaaattgcttctgaaaagatacaaactcaggatccttataattatttgggttttagactcactgaccaagctgtttttcaccagaaaattgttattcgtagagataacttaaggaccttaaatgattttcaaaaattgttaggtgatataaactggcttcgcccctatctaaagcttactacaggggagttgaaacctttatttgatattcttaaagggagttctgatcctacttcccctagatccctaacctcagaaggtttactggccttacagctagtggaaaaggctattgaagaacagtttgtcacttacatagattactccctgccgctgcacctgttaatttttaacacgactcatgtgcctacgggattgctatggcaaaaatttcctataatgtggatacattcaaggatttctcccaaacgtaatattttgccatatcatgaagcagtggctcagatgattatcactggaagaaggcaggcattgacttattttggaaaggagccagatatcattgtccagccttacagcgtgagtcaggacacttggctgaaacagcatagtacagattggttgcttgcacaattagggtttgaaggaactatagatagccactacccccaagataggttgataaaattcttaaatgtacatgatatgatatttcctaagatgacttccttacagcctttaaataatgctctattgatttttactgatggctcctctaaagggcgagctggatatcttattagtaatcaacaggttatcgtagagactcctggtctctcggctcagctcgccgaactaacagcagtactgaaggtttttcagtctgtacaggaggcttttaatatttttactgacagtttatatgttgctcagtcagtacccttattggaaacctgtggtacttttaacttcaatacgccgtcaggatctttattttcagaattacaaaacatcattctcgcccggaaaaatccgttttatattggccacatacggtctcactctggtcttcctggacctctggcagagggtaataattgcattgacagagctctaataggagaagccttagtttcagatcgggttgctttggcccaacgtgatcatgaaaggtttcatctctctagccataccctaaggctccgacataagatcaccaaggagcaagcgagaatgattgtaaaacaatgtcctaaatgtattactttatctccagtgccgcatctaggagttaatcctagaggccttatgcctaatcatatttggcaaatggatataacccattatgcagaatttggaaaactaaaatatatacatgtttgcattgatacttgttcaggatttctctttgcttctctgcatacaggagaagcttcaaaaaacgtaattgatcattgcctacaagcatttaatgccatgggattacctaaacttattaagacagacaatgggccatcttattccagtaaaaactttatttcattctgtaaagaattcggtattaaacataaaactggaattccttacaaccccatgggacaaggaatagttgaacgtgctcatcgcaccttaaagaattggctctttaagacaaaagaggggcagctatatcccccaaggtctccaaaggcccaccttgccttcaccttatttgtcctaaatttcttgcacaccgatatcaagggccagtctgcagcggatcgccactggcatccagttacttctaattcttatgcattggtaaaatggaaggaccccctgactaatgaatggaagggtccagatccagttctaatttggggtagaggctcagtttgtgttttttcacgagatgaagatggagcacggtggctgccagagagattaattcgtcagacgaacacagattctgactcttctggtaagtatcattctaaagactaagcggccgcaacaggggatccagacatgataagatacattgatgagtttggacaaaccacaactagaatgcagtgaaaaaaatgctttatttgtgaaatttgtgatgctattgctttatttgtaaccattataagctgcaataaacaagttaacaacaacaattgcattcattttatgtttcaggttcagggggaggtgtgggaggttttttcggatcctctagagtcgacctgcaggcatgcaagcttggcgtaatcatggtcatagctgtttcctgtgtgaaattgttatccgctcacaattccacacaacatacgagccggaagcataaagtgtaaagcctggggtgcctaatgagtgagctaactcacattaattgcgttgcgctcactgcccgctttccagtcgggaaacctgtcgtgccagctgcattaatgaatcggccaacgcgcggggagaggcggtttgcgtattgggcgctcttccgcttcctcgctcactgactcgctgcgctcggtcgttcggctgcggcgagcggtatcagctcactcaaaggcggtaatacggttatccacagaatcaggggataacgcaggaaagaacatgtgagcaaaaggccagcaaaaggccaggaaccgtaaaaaggccgcgttgctggcgtttttccataggctccgcccccctgacgagcatcacaaaaatcgacgctcaagtcagaggtggcgaaacccgacaggactataaagataccaggcgtttccccctggaagctccctcgtgcgctctcctgttccgaccctgccgcttaccggatacctgtccgcctttctcccttcgggaagcgtggcgctttctcatagctcacgctgtaggtatctcagttcggtgtaggtcgttcgctccaagctgggctgtgtgcacgaaccccccgttcagcccgaccgctgcgccttatccggtaactatcgtcttgagtccaacccggtaagacacgacttatcgccactggcagcagccactggtaacaggattagcagagcgaggtatgtaggcggtgctacagagttcttgaagtggtggcctaactacggctacactagaaggacagtatttggtatctgcgctctgctgaagccagttaccttcggaaaaagagttggtagctcttgatccggcaaacaaaccaccgctggtagcggtggtttttttgtttgcaagcagcagattacgcgcagaaaaaaaggatctcaagaagatcctttgatcttttctacggggtctgacgctcagtggaacgaaaactcacgttaagggattttggtcatgagattatcaaaaaggatcttcacctagatccttttaaattaaaaatgaagttttaaatcaatctaaagtatatatgagtaaacttggtctgacagttaccaatgcttaatcagtgaggcacctatctcagcgatctgtctatttcgttcatccatagttgcctgactccccgtcgtgtagataactacgatacgggagggcttaccatctggccccagtgctgcaatgataccgcgagacccacgctcaccggctccagatttatcagcaataaaccagccagccggaagggccgagcgcagaagtggtcctgcaactttatccgcctccatccagtctattaattgttgccgggaagctagagtaagtagttcgccagttaatagtttgcgcaacgttgttgccattgctacaggcatcgtggtgtcacgctcgtcgtttggtatggcttcattcagctccggttcccaacgatcaaggcgagttacatgatcccccatgttgtgcaaaaaagcggttagctccttcggtcctccgatcgttgtcagaagtaagttggccgcagtgttatcactcatggttatggcagcactgcataattctcttactgtcatgccatccgtaagatgcttttctgtgactggtgagtactcaaccaagtcattctgagaatagtgtatgcggcgaccgagttgctcttgcccggcgtcaatacgggataataccgcgccacatagcagaactttaaaagtgctcatcattggaaaacgttcttcggggcgaaaactctcaaggatcttaccgctgttgagatccagttcgatgtaacccactcgtgcacccaactgatcttcagcatcttttactttcaccagcgtttctgggtgagcaaaaacaggaaggcaaaatgccgcaaaaaagggaataagggcgacacggaaatgttgaatactcatactcttcctttttcaatattattgaagcatttatcagggttattgtctcatgagcggatacatatttgaatgtatttagaaaaataaacaaataggggttccgcgcacatttccccgaaaagtgccacctgacgtctaagaaaccattattatcatgacattaacctataaaaataggcgtatcacgaggccctttcgtctcgcgcgtttcggtgatgacggtgaaaacctctgacacatgcagctcccggagacggtcacagcttgtctgtaagcggatgccgggagcagacaagcccgtcagggcgcgtcagcgggtgttggcgggtgtcggggctggcttaactatgcggcatcagagcagattgtactgagagtgcaccatatgcggtgtgaaataccgcacagatgcgtaaggagaaaataccgcatcaggcgccattcgccattcaggctgcgcaactgttgggaagggcgatcggtgcgggcctcttcgctattacgccagctggcgaaagggggatgtgctgcaaggcgattaagttgggtaacgccagggttttcccagtcacgacgttgtaaaacgacggccagt

SEQ ID NO: 314 - DNA, 10717 bp, Artificial Sequence
  Description of Artificial Sequence: Synthetic polynucleotide
gaattcgagcttgcatgcctgcaggtcgttacataacttacggtaaatggcccgcctggctgaccgcccaacgacccccgcccattgacgtcaataatgacgtatgttcccatagtaacgccaatagggactttccattgacgtcaatgggtggagtatttacggtaaactgcccacttggcagtacatcaagtgtatcatatgccaagtacgccccctattgacgtcaatgacggtaaatggcccgcctggcattatgcccagtacatgaccttatgggactttcctacttggcagtacatctacgtattagtcatcgctattaccatggtgatgcggttttggcagtacatcaatgggcgtggatagcggtttgactcacggggatttccaagtctccaccccattgacgtcaatgggagtttgttttggcaccaaaatcaacgggactttccaaaatgtcgtaacaactccgccccattgacgcaaatgggcggtaggcgtgtacggtgggaggtctatataagcagagctcgtttagtgaaccgtcagagctttgatcagaatgaatttgtcttggctccgtttcttctttcgccccgtctagattcctctcttacagctcgagtggccttctcagtcgaaccgttcacgttgcgagctgctggcggccgcaacattttggcgccagaactgggacctgaagaatggcagagagatgctaagaggaacgctgctttggagctccacaggaaaggatcttcgtatcggacatcggagcaacggacaggtacacatgctagcgctagcttaaaatttcagttttgtaaagtgttgctgaggatgtggtaggatacgaattaagcttgaatcagtgctaacccaacgctggttctgcttgggtcagcagcgtgttaatcggaactagaaacggaaacaggcaggttagccgcagctttttaggaagctgcttaggtggaagaagaaagggtttaaagtcatggatcaggcggttgcccatagttttcaggagttgtttcaggccagaggagtaaggcttgaagtacaattagtaaaaaattttttaggtaagatagatagctgttgcccatggttcaaggaagaagaaacactagattgtggaacctgggagaaagttggtgaggccttaaaaatcactcaggcagataattttaccctaggcctctgggcactcataaatgatgcaataaaagatgccacttccccagggctaagttgcccccaggcggagcttgtggtatctcaggaggagtgcctgtcagagagggcctcctcagaaaaagatcttcttaactcaaaaattgataaatgtggaaactcggatgaaaaactgatttttaacaaaaatcactcagatagaggagctgcccattaccttaatgagaattggtcctcttgtgaatctcctgctcaacctgtagtccccacttcgggaggtgccactcatagggacacacgactaagcgagttagagtttgagattaagcttcagaggctgactaatgagcttcgggaactaaaaaagatgtcagaagcggagaagagtaactcttctgtagttcaccaggtgccgctagaaaaggttgtgagtcaggctcatgggaaaggacagaatatctctaatacgctagcctttcctgtggttgaggtagttgatcagcaagatactaggggcagacattaccagaccttagatttcaagttgataaaagagttaaaggcggctgttgtgcaatatggcccttcagccccattcactcaagcattactggacacagttgtggagtcacacttaacccctttagattggaagactctttctaaggctaccctgtcaggaggagattttttgctttgggattctgaatggcgagacgccagtaagaaaactgctgcttctaacgctcaggctggtaattcagactgggatagcaacatgcttttaggagagggcccttatgagggacagacaaatcagattgattttcccgttgcagtgtacgcgcaaattgcgacggccgcacgccgtgcttggggaaggttgccagtcaaaggagagattggtggaagtttagctagcattcggcagagttctgatgaaccatatcaggattttgtggacaggctattgatttcagctagtagaatccttggaaatccggacacgggaagtcctttcgttatgcaattggcttatgagaatgctaacgcaatttgccgagctgcgattcaaccgcataagggaacgacagatttggcgggatatgtccgtctttgcgcagacatcgggccttcctgcgagaccttgcagggaacccacgcgcaggcaatgttctctaggaaacgagggaatagtgcatgctttaaatgtggaagtttagatcattttagaattgattgtcctcagaacaagggcgccgaggttagacaaacaggccgtgccccgggaatatgtccccgatgtggaaagggccgccactgggcgaaagattgcaagcataaaacgagggttttgagccgcccggtgccgggaaacgaggaaaggggtcagccccaggccccaagttactcaaagaagacagcttatggggctctaaatctgctgcccagccaacaagatcagttcttgagcttgtcaggtcaaacccaggaaacgcaagactggacctctgttccactgtccatgcagcattaaccccagaagtgggagtccaaactctgcctaccggagtctttggaccactacctgtaggaacctgtggttttctcttaggacgaagcagttctattgtagaaggcctgcagatttatccaggtgttataagtaatgattatgagggagaaattaaaatcatagccgcttgccctcgtggtgctataactatacccgctaatcagaaaattgctcaacttaccttgatccccttgcgctggtcactatctaaattctctaaaaatgaagaaggacagattaactttgactcctctggcgtaaattgggtgaaatctatcactaatcagagacctaaccttaaattgattcttgatggaaaaagctttgaaggattaatagataccggggccgatgtaaccattattagagggcaggactggccctcaaactggcccctgtctgtttccttgactcaccttcaaggaattggttatgccagtaacccaaaacgtagttccaaattgctaacctggagagatgaggatggaaaatcaggaaatattcagccgtatgttatgcaaaatttgcctgtaaccctgtggggaagagatctgttgtcacagatgggcgttatcctgtgcagttctaaggaaatggtgactgaacagacgttcaggcagggacccctgcctgatcgtggactaataaagaagggacagaaaattaagacttttgaagatcttaaaccccactctaacgtgagaggtttaaagtattttcagtagtggccgctgtcttgcctgcatcccacgccgaaaaaattcaatggcgtaatgatattccggtgtgggtagatcagtggtctttacctaaagagaaaatagaggccgcttctctgctagtgcaggagcagttagaagcaggacatttggtggagtctcattctccctggaatacacccattttcattatcaggaagaaatcgggaaaatggagactgttgcaagatttaagaaaggttaatgaaaccatggtacttatgggaactttacaaccggggctcccctccccagtagccattcctaagggatactataagattgttatagatttgaaagattgtttctttaccatccctttgcatccagaggattgtgagagatttgcttttagtgttccttctgtaaatttcaaggaacccatgaaaagatatcaatggacagttctcccgcaggggatggctaatagtcccaccttatgtcaaaagtttgtggcaaaggcaattcagcctgttagacaacaatggccaaatatttacatcattcatttcacagatgatgttttgatggcgggaaaggacccccaagatttgcttttgtgttatggagacttacgaaaggccctggctgataagggattacaaattgcttctgaaaagatacaaactcaggatccttataattatttgggttttagactcactgaccaagctgtttttcaccagaaaattgttattcgtagagataacttaaggaccttaaatgattttcaaaaattgttaggtgatataaactggcttcgcccctatctaaagcttactacaggggagttgaaacctttatttgatattcttaaagggagttctgatcctacttcccctagatccctaacctcagaaggtttactggccttacagctagtggaaaaggctattgaagaacagtttgtcacttacatagattactccctgccgctgcacctgttaatttttaacacgactcatgtgcctacgggattgctatggcaaaaatttcctataatgtggatacattcaaggatttctcccaaacgtaatattttgccatatcatgaagcagtggctcagatgattatcactggaagaaggcaggcattgacttattttggaaaggagccagatatcattgtccagccttacagcgtgagtcaggacacttggctgaaacagcatagtacagattggttgcttgcacaattagggtttgaaggaactatagatagccactacccccaagataggttgataaaattcttaaatgtacatgatatgatatttcctaagatgacttccttacagcctttaaataatgctctattgatttttactgatggctcctctaaagggcgagctggatatcttattagtaatcaacaggttatcgtagagactcctggtctctcggctcagctcgccgaactaacagcagtactgaaggtttttcagtctgtacaggaggcttttaatatttttactgacagtttatatgttgctcagtcagtacccttattggaaacctgtggtacttttaacttcaatacgccgtcaggatctttattttcagaattacaaaacatcattctcgcccggaaaaatccgttttatattggccacatacggtctcactctggtcttcctggacctctggcagagggtaataattgcattgacagagctctaataggagaagccttagtttcagatcgggttgctttggcccaacgtgatcatgaaaggtttcatctctctagccataccctaaggctccgacataagatcaccaaggagcaagcgagaatgattgtaaaacaatgtcctaaatgtattactttatctccagtgccgcatctaggagttaatcctagaggccttatgcctaatcatatttggcaaatggatataacccattatgcagaatttggaaaactaaaatatatacatgtttgcattgatacttgttcaggatttctctttgcttctctgcatacaggagaagcttcaaaaaacgtaattgatcattgcctacaagcatttaatgccatgggattacctaaacttattaagacagacaatgggccatcttattccagtaaaaactttatttcattctgtaaagaattcggtattaaacataaaactggaattccttacaaccccatgggacaaggaatagttgaacgtgctcatcgcaccttaaagaattggctctttaagacaaaagaggggcagctatatcccccaaggtctccaaaggcccaccttgccttcaccttatttgtcctaaatttcttgcacaccgatatcaagggccagtctgcagcggatcgccactggcatccagttacttctaattcttatgcattggtaaaatggaaggaccccctgactaatgaatggaagggtccagatccagttctaatttggggtagaggctcagtttgtgttttttcacgagatgaagatggagcacggtggctgccagagagattaattcgtcagacgaacacagattctgactcttctggtaagtatcattctaaagactaaaattccttttgtgcttaaaattcagctgagagcaacagctctcaaagctgttctccagctactctctgagccagctcccgacaggaggccggagactagcctcagctttacaatttgcatttaaataaagtacctagacttccccgaaaaaagttctgcttttctactttctcactgtctttcaagattttgtctttcaagcaggtaaatcaacattctcgaggcggaccagcggatgtgcatccccgcccccctagagcactcaggtggcagctgttatccccagtctcaggacattccagcatgtggccttcagtctgagttaaaaattaggtttacccagaggactagaatagtagatatttctatattaataaagattggtttttattttgatagacaggcttagccccttagctgacctctggcttttcacccttgctgttactgcaaggtgtctttagctcaataaggctgtggaaaaaaacagggatgaggaggaacggctcccagctcctattttagccacaaatcgtggtgttactaacgacataattcttgcttaggctttgctaaatctgaggttgataattctcctttaggagctgcacagcgctcagaactgtgcatactgatttgtgatggtacaaattcagtatgggcatcgcttggtgcagatggaggtactgcaaggaaaggtcccagcttgaccatttctgagtttcctgtgagataaacccggtttgaaagaggttggtaccaaattatatatccctcggctctacctcgcctccccaaaaggtaccagagccacaggtgtggattttaacagaatccacgggaggaatcgggtccatgtccacccaagccaaggttaaaagcccactcatctacggatgagaaaatcatttgatcacctcagttaagcgctgccttattttaacttaattaataggggggagagagattggagacttactattgaaagggcaagcccttcactgcctcccacccaaataaaaaagccaattggccttgtactacagagctggccggaccccttatccctgttacccaccaatcatccaaaaatgcggaggaatatcaacttagtgttattcttattatagtgtatttcacacttgttcagtcaaacttagccagagttccaacgccctacttaaaattcaactagaaagttacctaccaagtactaattagcattataaagtcagagcctacagctccaggcttttcagttagttgtttactaagataagaaaagacagtcttagccagatacagtttaccataataaaagttaaagaatcccagggaagcaagttttttcttttagccctagattccaggcagaactattgagcatagataatttttccccctcaggccagctttttctttttttttaattttgttaataaaagggaggagatgtagtctcccctcccccagcctgaaacctgcttgctcaggggtggagcttcccgctcatcgctctgccacgcccactgctggaacctgcggagccacacacgtgcacctttctactggaccagagattattcggcgggaatcgggtcccctcccccttccttcataactagtgtcccaacaataaaatttgagctttgatcagaatgaatttgtcttggctccgtttcttctttcgccccgtctagattcctctcttacagctcgagtggccttctcagtcgaaccgttcacgttgcgagctgctggcggccgcaacaggggatccagacatgataagatacattgatgagtttggacaaaccacaactagaatgcagtgaaaaaaatgctttatttgtgaaatttgtgatgctattgctttatttgtaaccattataagctgcaataaacaagttaacaacaacaattgcattcattttatgtttcaggttcagggggaggtgtgggaggttttttcggatcctctagagtcgacctgcaggcatgcaagcttggcgtaatcatggtcatagctgtttcctgtgtgaaattgttatccgctcacaattccacacaacatacgagccggaagcataaagtgtaaagcctggggtgcctaatgagtgagctaactcacattaattgcgttgcgctcactgcccgctttccagtcgggaaacctgtcgtgccagctgcattaatgaatcggccaacgcgcggggagaggcggtttgcgtattgggcgctcttccgcttcctcgctcactgactcgctgcgctcggtcgttcggctgcggcgagcggtatcagctcactcaaaggcggtaatacggttatccacagaatcaggggataacgcaggaaagaacatgtgagcaaaaggccagcaaaaggccaggaaccgtaaaaaggccgcgttgctggcgtttttccataggctccgcccccctgacgagcatcacaaaaatcgacgctcaagtcagaggtggcgaaacccgacaggactataaagataccaggcgtttccccctggaagctccctcgtgcgctctcctgttccgaccctgccgcttaccggatacctgtccgcctttctcccttcgggaagcgtggcgctttctcatagctcacgctgtaggtatctcagttcggtgtaggtcgttcgctccaagctgggctgtgtgcacgaaccccccgttcagcccgaccgctgcgccttatccggtaactatcgtcttgagtccaacccggtaagacacgacttatcgccactggcagcagccactggtaacaggattagcagagcgaggtatgtaggcggtgctacagagttcttgaagtggtggcctaactacggctacactagaaggacagtatttggtatctgcgctctgctgaagccagttaccttcggaaaaagagttggtagctcttgatccggcaaacaaaccaccgctggtagcggtggtttttttgtttgcaagcagcagattacgcgcagaaaaaaaggatctcaagaagatcctttgatcttttctacggggtctgacgctcagtggaacgaaaactcacgttaagggattttggtcatgagattatcaaaaaggatcttcacctagatccttttaaattaaaaatgaagttttaaatcaatctaaagtatatatgagtaaacttggtctgacagttaccaatgcttaatcagtgaggcacctatctcagcgatctgtctatttcgttcatccatagttgcctgactccccgtcgtgtagataactacgatacgggagggcttaccatctggccccagtgctgcaatgataccgcgagacccacgctcaccggctccagatttatcagcaataaaccagccagccggaagggccgagcgcagaagtggtcctgcaactttatccgcctccatccagtctattaattgttgccgggaagctagagtaagtagttcgccagttaatagtttgcgcaacgttgttgccattgctacaggcatcgtggtgtcacgctcgtcgtttggtatggcttcattcagctccggttcccaacgatcaaggcgagttacatgatcccccatgttgtgcaaaaaagcggttagctccttcggtcctccgatcgttgtcagaagtaagttggccgcagtgttatcactcatggttatggcagcactgcataattctcttactgtcatgccatccgtaagatgcttttctgtgactggtgagtactcaaccaagtcattctgagaatagtgtatgcggcgaccgagttgctcttgcccggcgtcaatacgggataataccgcgccacatagcagaactttaaaagtgctcatcattggaaaacgttcttcggggcgaaaactctcaaggatcttaccgctgttgagatccagttcgatgtaacccactcgtgcacccaactgatcttcagcatcttttactttcaccagcgtttctgggtgagcaaaaacaggaaggcaaaatgccgcaaaaaagggaataagggcgacacggaaatgttgaatactcatactcttcctttttcaatattattgaagcatttatcagggttattgtctcatgagcggatacatatttgaatgtatttagaaaaataaacaaataggggttccgcgcacatttccccgaaaagtgccacctgacgtctaagaaaccattattatcatgacattaacctataaaaataggcgtatcacgaggccctttcgtctcgcgcgtttcggtgatgacggtgaaaacctctgacacatgcagctcccggagacggtcacagcttgtctgtaagcggatgccgggagcagacaagcccgtcagggcgcgtcagcgggtgttggcgggtgtcggggctggcttaactatgcggcatcagagcagattgtactgagagtgcaccatatgcggtgtgaaataccgcacagatgcgtaaggagaaaataccgcatcaggcgccattcgccattcaggctgcgcaactgttgggaagggcgatcggtgcgggcctcttcgctattacgccagctggcgaaagggggatgtgctgcaaggcgattaagttgggtaacgccagggttttcccagtcacgacgttgtaaaacgacggccagt

SEQ ID NO: 315 - DNA, 10715 bp, Artificial Sequence
  Description of Artificial Sequence: Synthetic polynucleotide
gaattcgagcttgcatgcctgcaggtcgttacataacttacggtaaatggcccgcctggctgaccgcccaacgacccccgcccattgacgtcaataatgacgtatgttcccatagtaacgccaatagggactttccattgacgtcaatgggtggagtatttacggtaaactgcccacttggcagtacatcaagtgtatcatatgccaagtacgccccctattgacgtcaatgacggtaaatggcccgcctggcattatgcccagtacatgaccttatgggactttcctacttggcagtacatctacgtattagtcatcgctattaccatggtgatgcggttttggcagtacatcaatgggcgtggatagcggtttgactcacggggatttccaagtctccaccccattgacgtcaatgggagtttgttttggcaccaaaatcaacgggactttccaaaatgtcgtaacaactccgccccattgacgcaaatgggcggtaggcgtgtacggtgggaggtctatataagcagagctcgtttagtgaaccgtcagctttgatcagaatgaatttgtcttggctccgtttcttctttcgccccgtctagattcctctcttacagctcgagtggccttctcagtcgaaccgttcacgttgcgagctgctggcggccgcaacattttggcgccagaactgggacctgaagaatggcagagagatgctaagaggaacgctgctttggagctccacaggaaaggatcttcgtatcggacatcggagcaacggacaggtacacatgctagcgctagcttaaaatttcagttttgtaaagtgttgctgaggatgtggtaggatacgaattaagcttgaatcagtgctaacccaacgctggttctgcttgggtcagcagcgtgttaatcggaactagaaacggaaacaggcaggttagccgcagctttttaggaagctgcttaggtggaagaagaaagggtttaaagtcatggatcaggcggttgcccatagttttcaggagttgtttcaggccagaggagtaaggcttgaagtacaattagtaaaaaattttttaggtaagatagatagctgttgcccatggttcaaggaagaagaaacactagattgtggaacctgggagaaagttggtgaggccttaaaaatcactcaggcagataattttaccctaggcctctgggcactcataaatgatgcaataaaagatgccacttccccagggctaagttgcccccaggcggagcttgtggtatctcaggaggagtgcctgtcagagagggcctcctcagaaaaagatcttcttaactcaaaaattgataaatgtggaaactcggatgaaaaactgatttttaacaaaaatcactcagatagaggagctgcccattaccttaatgagaattggtcctcttgtgaatctcctgctcaacctgtagtccccacttcgggaggtgccactcatagggacacacgactaagcgagttagagtttgagattaagcttcagaggctgactaatgagcttcgggaactaaaaaagatgtcagaagcggagaagagtaactcttctgtagttcaccaggtgccgctagaaaaggttgtgagtcaggctcatgggaaaggacagaatatctctaatacgctagcctttcctgtggttgaggtagttgatcagcaagatactaggggcagacattaccagaccttagatttcaagttgataaaagagttaaaggcggctgttgtgcaatatggcccttcagccccattcactcaagcattactggacacagttgtggagtcacacttaacccctttagattggaagactctttctaaggctaccctgtcaggaggagattttttgctttgggattctgaatggcgagacgccagtaagaaaactgctgcttctaacgctcaggctggtaattcagactgggatagcaacatgcttttaggagagggcccttatgagggacagacaaatcagattgattttcccgttgcagtgtacgcgcaaattgcgacggccgcacgccgtgcttggggaaggttgccagtcaaaggagagattggtggaagtttagctagcattcggcagagttctgatgaaccatatcaggattttgtggacaggctattgatttcagctagtagaatccttggaaatccggacacgggaagtcctttcgttatgcaattggcttatgagaatgctaacgcaatttgccgagctgcgattcaaccgcataagggaacgacagatttggcgggatatgtccgtctttgcgcagacatcgggccttcctgcgagaccttgcagggaacccacgcgcaggcaatgttctctaggaaacgagggaatagtgcatgctttaaatgtggaagtttagatcattttagaattgattgtcctcagaacaagggcgccgaggttagacaaacaggccgtgccccgggaatatgtccccgatgtggaaagggccgccactgggcgaaagattgcaagcataaaacgagggttttgagccgcccggtgccgggaaacgaggaaaggggtcagccccaggccccaagttactcaaagaagacagcttatggggctctaaatctgctgcccagccaacaagatcagttcttgagcttgtcaggtcaaacccaggaaacgcaagactggacctctgttccactgtccatgcagcattaaccccagaagtgggagtccaaactctgcctaccggagtctttggaccactacctgtaggaacctgtggttttctcttaggacgaagcagttctattgtagaaggcctgcagatttatccaggtgttataagtaatgattatgagggagaaattaaaatcatagccgcttgccctcgtggtgctataactatacccgctaatcagaaaattgctcaacttaccttgatccccttgcgctggtcactatctaaattctctaaaaatgaagaaggacagattaactttgactcctctggcgtaaattgggtgaaatctatcactaatcagagacctaaccttaaattgattcttgatggaaaaagctttgaaggattaatagataccggggccgatgtaaccattattagagggcaggactggccctcaaactggcccctgtctgtttccttgactcaccttcaaggaattggttatgccagtaacccaaaacgtagttccaaattgctaacctggagagatgaggatggaaaatcaggaaatattcagccgtatgttatgcaaaatttgcctgtaaccctgtggggaagagatctgttgtcacagatgggcgttatcctgtgcagttctaaggaaatggtgactgaacagacgttcaggcagggacccctgcctgatcgtggactaataaagaagggacagaaaattaagacttttgaagatcttaaaccccactctaacgtgagaggtttaaagtattttcagtagtggccgctgtcttgcctgcatcccacgccgaaaaaattcaatggcgtaatgatattccggtgtgggtagatcagtggtctttacctaaagagaaaatagaggccgcttctctgctagtgcaggagcagttagaagcaggacatttggtggagtctcattctccctggaatacacccattttcattatcaggaagaaatcgggaaaatggagactgttgcaagatttaagaaaggttaatgaaaccatggtacttatgggaactttacaaccggggctcccctccccagtagccattcctaagggatactataagattgttatagatttgaaagattgtttctttaccatccctttgcatccagaggattgtgagagatttgcttttagtgttccttctgtaaatttcaaggaacccatgaaaagatatcaatggacagttctcccgcaggggatggctaatagtcccaccttatgtcaaaagtttgtggcaaaggcaattcagcctgttagacaacaatggccaaatatttacatcattcatttcacagatgatgttttgatggcgggaaaggacccccaagatttgcttttgtgttatggagacttacgaaaggccctggctgataagggattacaaattgcttctgaaaagatacaaactcaggatccttataattatttgggttttagactcactgaccaagctgtttttcaccagaaaattgttattcgtagagataacttaaggaccttaaatgattttcaaaaattgttaggtgatataaactggcttcgcccctatctaaagcttactacaggggagttgaaacctttatttgatattcttaaagggagttctgatcctacttcccctagatccctaacctcagaaggtttactggccttacagctagtggaaaaggctattgaagaacagtttgtcacttacatagattactccctgccgctgcacctgttaatttttaacacgactcatgtgcctacgggattgctatggcaaaaatttcctataatgtggatacattcaaggatttctcccaaacgtaatattttgccatatcatgaagcagtggctcagatgattatcactggaagaaggcaggcattgacttattttggaaaggagccagatatcattgtccagccttacagcgtgagtcaggacacttggctgaaacagcatagtacagattggttgcttgcacaattagggtttgaaggaactatagatagccactacccccaagataggttgataaaattcttaaatgtacatgatatgatatttcctaagatgacttccttacagcctttaaataatgctctattgatttttactgatggctcctctaaagggcgagctggatatcttattagtaatcaacaggttatcgtagagactcctggtctctcggctcagctcgccgaactaacagcagtactgaaggtttttcagtctgtacaggaggcttttaatatttttactgacagtttatatgttgctcagtcagtacccttattggaaacctgtggtacttttaacttcaatacgccgtcaggatctttattttcagaattacaaaacatcattctcgcccggaaaaatccgttttatattggccacatacggtctcactctggtcttcctggacctctggcagagggtaataattgcattgacagagctctaataggagaagccttagtttcagatcgggttgctttggcccaacgtgatcatgaaaggtttcatctctctagccataccctaaggctccgacataagatcaccaaggagcaagcgagaatgattgtaaaacaatgtcctaaatgtattactttatctccagtgccgcatctaggagttaatcctagaggccttatgcctaatcatatttggcaaatggatataacccattatgcagaatttggaaaactaaaatatatacatgtttgcattgatacttgttcaggatttctctttgcttctctgcatacaggagaagcttcaaaaaacgtaattgatcattgcctacaagcatttaatgccatgggattacctaaacttattaagacagacaatgggccatcttattccagtaaaaactttatttcattctgtaaagaattcggtattaaacataaaactggaattccttacaaccccatgggacaaggaatagttgaacgtgctcatcgcaccttaaagaattggctctttaagacaaaagaggggcagctatatcccccaaggtctccaaaggcccaccttgccttcaccttatttgtcctaaatttcttgcacaccgatatcaagggccagtctgcagcggatcgccactggcatccagttacttctaattcttatgcattggtaaaatggaaggaccccctgactaatgaatggaagggtccagatccagttctaatttggggtagaggctcagtttgtgttttttcacgagatgaagatggagcacggtggctgccagagagattaattcgtcagacgaacacagattctgactcttctggtaagtatcattctaaagactaaaattccttttgtgcttaaaattcagctgagagcaacagctctcaaagctgttctccagctactctctgagccagctcccgacaggaggccggagactagcctcagctttacaatttgcatttaaataaagtacctagacttccccgaaaaaagttctgcttttctactttctcactgtctttcaagattttgtctttcaagcaggtaaatcaacattctcgaggcggaccagcggatgtgcatccccgcccccctagagcactcaggtggcagctgttatccccagtctcaggacattccagcatgtggccttcagtctgagttaaaaattaggtttacccagaggactagaatagtagatatttctatattaataaagattggtttttattttgatagacaggcttagccccttagctgacctctggcttttcacccttgctgttactgcaaggtgtctttagctcaataaggctgtggaaaaaaacagggatgaggaggaacggctcccagctcctattttagccacaaatcgtggtgttactaacgacataattcttgcttaggctttgctaaatctgaggttgataattctcctttaggagctgcacagcgctcagaactgtgcatactgatttgtgatggtacaaattcagtatgggcatcgcttggtgcagatggaggtactgcaaggaaaggtcccagcttgaccatttctgagtttcctgtgagataaacccggtttgaaagaggttggtaccaaattatatatccctcggctctacctcgcctccccaaaaggtaccagagccacaggtgtggattttaacagaatccacgggaggaatcgggtccatgtccacccaagccaaggttaaaagcccactcatctacggatgagaaaatcatttgatcacctcagttaagcgctgccttattttaacttaattaataggggggagagagattggagacttactattgaaagggcaagcccttcactgcctcccacccaaataaaaaagccaattggccttgtactacagagctggccggaccccttatccctgttacccaccaatcatccaaaaatgcggaggaatatcaacttagtgttattcttattatagtgtatttcacacttgttcagtcaaacttagccagagttccaacgccctacttaaaattcaactagaaagttacctaccaagtactaattagcattataaagtcagagcctacagctccaggcttttcagttagttgtttactaagataagaaaagacagtcttagccagatacagtttaccataataaaagttaaagaatcccagggaagcaagttttttcttttagccctagattccaggcagaactattgagcatagataatttttccccctcaggccagctttttctttttttttaattttgttaataaaagggaggagatgtagtctcccctcccccagcctgaaacctgcttgctcaggggtggagcttcccgctcatcgctctgccacgcccactgctggaacctgcggagccacacacgtgcacctttctactggaccagagattattcggcgggaatcgggtcccctcccccttccttcataactagtgtcccaacaataaaatttgagctttgatcagaatgaatttgtcttggctccgtttcttctttcgccccgtctagattcctctcttacagctcgagtggccttctcagtcgaaccgttcacgttgcgagctgctggcggccgcaacaggggatccagacatgataagatacattgatgagtttggacaaaccacaactagaatgcagtgaaaaaaatgctttatttgtgaaatttgtgatgctattgctttatttgtaaccattataagctgcaataaacaagttaacaacaacaattgcattcattttatgtttcaggttcagggggaggtgtgggaggttttttcggatcctctagagtcgacctgcaggcatgcaagcttggcgtaatcatggtcatagctgtttcctgtgtgaaattgttatccgctcacaattccacacaacatacgagccggaagcataaagtgtaaagcctggggtgcctaatgagtgagctaactcacattaattgcgttgcgctcactgcccgctttccagtcgggaaacctgtcgtgccagctgcattaatgaatcggccaacgcgcggggagaggcggtttgcgtattgggcgctcttccgcttcctcgctcactgactcgctgcgctcggtcgttcggctgcggcgagcggtatcagctcactcaaaggcggtaatacggttatccacagaatcaggggataacgcaggaaagaacatgtgagcaaaaggccagcaaaaggccaggaaccgtaaaaaggccgcgttgctggcgtttttccataggctccgcccccctgacgagcatcacaaaaatcgacgctcaagtcagaggtggcgaaacccgacaggactataaagataccaggcgtttccccctggaagctccctcgtgcgctctcctgttccgaccctgccgcttaccggatacctgtccgcctttctcccttcgggaagcgtggcgctttctcatagctcacgctgtaggtatctcagttcggtgtaggtcgttcgctccaagctgggctgtgtgcacgaaccccccgttcagcccgaccgctgcgccttatccggtaactatcgtcttgagtccaacccggtaagacacgacttatcgccactggcagcagccactggtaacaggattagcagagcgaggtatgtaggcggtgctacagagttcttgaagtggtggcctaactacggctacactagaaggacagtatttggtatctgcgctctgctgaagccagttaccttcggaaaaagagttggtagctcttgatccggcaaacaaaccaccgctggtagcggtggtttttttgtttgcaagcagcagattacgcgcagaaaaaaaggatctcaagaagatcctttgatcttttctacggggtctgacgctcagtggaacgaaaactcacgttaagggattttggtcatgagattatcaaaaaggatcttcacctagatccttttaaattaaaaatgaagttttaaatcaatctaaagtatatatgagtaaacttggtctgacagttaccaatgcttaatcagtgaggcacctatctcagcgatctgtctatttcgttcatccatagttgcctgactccccgtcgtgtagataactacgatacgggagggcttaccatctggccccagtgctgcaatgataccgcgagacccacgctcaccggctccagatttatcagcaataaaccagccagccggaagggccgagcgcagaagtggtcctgcaactttatccgcctccatccagtctattaattgttgccgggaagctagagtaagtagttcgccagttaatagtttgcgcaacgttgttgccattgctacaggcatcgtggtgtcacgctcgtcgtttggtatggcttcattcagctccggttcccaacgatcaaggcgagttacatgatcccccatgttgtgcaaaaaagcggttagctccttcggtcctccgatcgttgtcagaagtaagttggccgcagtgttatcactcatggttatggcagcactgcataattctcttactgtcatgccatccgtaagatgcttttctgtgactggtgagtactcaaccaagtcattctgagaatagtgtatgcggcgaccgagttgctcttgcccggcgtcaatacgggataataccgcgccacatagcagaactttaaaagtgctcatcattggaaaacgttcttcggggcgaaaactctcaaggatcttaccgctgttgagatccagttcgatgtaacccactcgtgcacccaactgatcttcagcatcttttactttcaccagcgtttctgggtgagcaaaaacaggaaggcaaaatgccgcaaaaaagggaataagggcgacacggaaatgttgaatactcatactcttcctttttcaatattattgaagcatttatcagggttattgtctcatgagcggatacatatttgaatgtatttagaaaaataaacaaataggggttccgcgcacatttccccgaaaagtgccacctgacgtctaagaaaccattattatcatgacattaacctataaaaataggcgtatcacgaggccctttcgtctcgcgcgtttcggtgatgacggtgaaaacctctgacacatgcagctcccggagacggtcacagcttgtctgtaagcggatgccgggagcagacaagcccgtcagggcgcgtcagcgggtgttggcgggtgtcggggctggcttaactatgcggcatcagagcagattgtactgagagtgcaccatatgcggtgtgaaataccgcacagatgcgtaaggagaaaataccgcatcaggcgccattcgccattcaggctgcgcaactgttgggaagggcgatcggtgcgggcctcttcgctattacgccagctggcgaaagggggatgtgctgcaaggcgattaagttgggtaacgccagggttttcccagtcacgacgttgtaaaacgacggccagt

SEQ ID NO: 316 - DNA, 10700 bp, Artificial Sequence
  Description of Artificial Sequence: Synthetic polynucleotide
gaattcgagcttgcatgcctgcaggtcgttacataacttacggtaaatggcccgcctggctgaccgcccaacgacccccgcccattgacgtcaataatgacgtatgttcccatagtaacgccaatagggactttccattgacgtcaatgggtggagtatttacggtaaactgcccacttggcagtacatcaagtgtatcatatgccaagtacgccccctattgacgtcaatgacggtaaatggcccgcctggcattatgcccagtacatgaccttatgggactttcctacttggcagtacatctacgtattagtcatcgctattaccatggtgatgcggttttggcagtacatcaatgggcgtggatagcggtttgactcacggggatttccaagtctccaccccattgacgtcaatgggagtttgttttggcaccaaaatcaacgggactttccaaaatgtcgtaacaactccgccccattgacgcaaatgggcggtaggcgtgtacggtgggaggtctatataagcagagctgagctttgatcagaatgaatttgtcttggctccgtttcttctttcgccccgtctagattcctctcttacagctcgagtggccttctcagtcgaaccgttcacgttgcgagctgctggcggccgcaacattttggcgccagaactgggacctgaagaatggcagagagatgctaagaggaacgctgctttggagctccacaggaaaggatcttcgtatcggacatcggagcaacggacaggtacacatgctagcgctagcttaaaatttcagttttgtaaagtgttgctgaggatgtggtaggatacgaattaagcttgaatcagtgctaacccaacgctggttctgcttgggtcagcagcgtgttaatcggaactagaaacggaaacaggcaggttagccgcagctttttaggaagctgcttaggtggaagaagaaagggtttaaagtcatggatcaggcggttgcccatagttttcaggagttgtttcaggccagaggagtaaggcttgaagtacaattagtaaaaaattttttaggtaagatagatagctgttgcccatggttcaaggaagaagaaacactagattgtggaacctgggagaaagttggtgaggccttaaaaatcactcaggcagataattttaccctaggcctctgggcactcataaatgatgcaataaaagatgccacttccccagggctaagttgcccccaggcggagcttgtggtatctcaggaggagtgcctgtcagagagggcctcctcagaaaaagatcttcttaactcaaaaattgataaatgtggaaactcggatgaaaaactgatttttaacaaaaatcactcagatagaggagctgcccattaccttaatgagaattggtcctcttgtgaatctcctgctcaacctgtagtccccacttcgggaggtgccactcatagggacacacgactaagcgagttagagtttgagattaagcttcagaggctgactaatgagcttcgggaactaaaaaagatgtcagaagcggagaagagtaactcttctgtagttcaccaggtgccgctagaaaaggttgtgagtcaggctcatgggaaaggacagaatatctctaatacgctagcctttcctgtggttgaggtagttgatcagcaagatactaggggcagacattaccagaccttagatttcaagttgataaaagagttaaaggcggctgttgtgcaatatggcccttcagccccattcactcaagcattactggacacagttgtggagtcacacttaacccctttagattggaagactctttctaaggctaccctgtcaggaggagattttttgctttgggattctgaatggcgagacgccagtaagaaaactgctgcttctaacgctcaggctggtaattcagactgggatagcaacatgcttttaggagagggcccttatgagggacagacaaatcagattgattttcccgttgcagtgtacgcgcaaattgcgacggccgcacgccgtgcttggggaaggttgccagtcaaaggagagattggtggaagtttagctagcattcggcagagttctgatgaaccatatcaggattttgtggacaggctattgatttcagctagtagaatccttggaaatccggacacgggaagtcctttcgttatgcaattggcttatgagaatgctaacgcaatttgccgagctgcgattcaaccgcataagggaacgacagatttggcgggatatgtccgtctttgcgcagacatcgggccttcctgcgagaccttgcagggaacccacgcgcaggcaatgttctctaggaaacgagggaatagtgcatgctttaaatgtggaagtttagatcattttagaattgattgtcctcagaacaagggcgccgaggttagacaaacaggccgtgccccgggaatatgtccccgatgtggaaagggccgccactgggcgaaagattgcaagcataaaacgagggttttgagccgcccggtgccgggaaacgaggaaaggggtcagccccaggccccaagttactcaaagaagacagcttatggggctctaaatctgctgcccagccaacaagatcagttcttgagcttgtcaggtcaaacccaggaaacgcaagactggacctctgttccactgtccatgcagcattaaccccagaagtgggagtccaaactctgcctaccggagtctttggaccactacctgtaggaacctgtggttttctcttaggacgaagcagttctattgtagaaggcctgcagatttatccaggtgttataagtaatgattatgagggagaaattaaaatcatagccgcttgccctcgtggtgctataactatacccgctaatcagaaaattgctcaacttaccttgatccccttgcgctggtcactatctaaattctctaaaaatgaagaaggacagattaactttgactcctctggcgtaaattgggtgaaatctatcactaatcagagacctaaccttaaattgattcttgatggaaaaagctttgaaggattaatagataccggggccgatgtaaccattattagagggcaggactggccctcaaactggcccctgtctgtttccttgactcaccttcaaggaattggttatgccagtaacccaaaacgtagttccaaattgctaacctggagagatgaggatggaaaatcaggaaatattcagccgtatgttatgcaaaatttgcctgtaaccctgtggggaagagatctgttgtcacagatgggcgttatcctgtgcagttctaaggaaatggtgactgaacagacgttcaggcagggacccctgcctgatcgtggactaataaagaagggacagaaaattaagacttttgaagatcttaaaccccactctaacgtgagaggtttaaagtattttcagtagtggccgctgtcttgcctgcatcccacgccgaaaaaattcaatggcgtaatgatattccggtgtgggtagatcagtggtctttacctaaagagaaaatagaggccgcttctctgctagtgcaggagcagttagaagcaggacatttggtggagtctcattctccctggaatacacccattttcattatcaggaagaaatcgggaaaatggagactgttgcaagatttaagaaaggttaatgaaaccatggtacttatgggaactttacaaccggggctcccctccccagtagccattcctaagggatactataagattgttatagatttgaaagattgtttctttaccatccctttgcatccagaggattgtgagagatttgcttttagtgttccttctgtaaatttcaaggaacccatgaaaagatatcaatggacagttctcccgcaggggatggctaatagtcccaccttatgtcaaaagtttgtggcaaaggcaattcagcctgttagacaacaatggccaaatatttacatcattcatttcacagatgatgttttgatggcgggaaaggacccccaagatttgcttttgtgttatggagacttacgaaaggccctggctgataagggattacaaattgcttctgaaaagatacaaactcaggatccttataattatttgggttttagactcactgaccaagctgtttttcaccagaaaattgttattcgtagagataacttaaggaccttaaatgattttcaaaaattgttaggtgatataaactggcttcgcccctatctaaagcttactacaggggagttgaaacctttatttgatattcttaaagggagttctgatcctacttcccctagatccctaacctcagaaggtttactggccttacagctagtggaaaaggctattgaagaacagtttgtcacttacatagattactccctgccgctgcacctgttaatttttaacacgactcatgtgcctacgggattgctatggcaaaaatttcctataatgtggatacattcaaggatttctcccaaacgtaatattttgccatatcatgaagcagtggctcagatgattatcactggaagaaggcaggcattgacttattttggaaaggagccagatatcattgtccagccttacagcgtgagtcaggacacttggctgaaacagcatagtacagattggttgcttgcacaattagggtttgaaggaactatagatagccactacccccaagataggttgataaaattcttaaatgtacatgatatgatatttcctaagatgacttccttacagcctttaaataatgctctattgatttttactgatggctcctctaaagggcgagctggatatcttattagtaatcaacaggttatcgtagagactcctggtctctcggctcagctcgccgaactaacagcagtactgaaggtttttcagtctgtacaggaggcttttaatatttttactgacagtttatatgttgctcagtcagtacccttattggaaacctgtggtacttttaacttcaatacgccgtcaggatctttattttcagaattacaaaacatcattctcgcccggaaaaatccgttttatattggccacatacggtctcactctggtcttcctggacctctggcagagggtaataattgcattgacagagctctaataggagaagccttagtttcagatcgggttgctttggcccaacgtgatcatgaaaggtttcatctctctagccataccctaaggctccgacataagatcaccaaggagcaagcgagaatgattgtaaaacaatgtcctaaatgtattactttatctccagtgccgcatctaggagttaatcctagaggccttatgcctaatcatatttggcaaatggatataacccattatgcagaatttggaaaactaaaatatatacatgtttgcattgatacttgttcaggatttctctttgcttctctgcatacaggagaagcttcaaaaaacgtaattgatcattgcctacaagcatttaatgccatgggattacctaaacttattaagacagacaatgggccatcttattccagtaaaaactttatttcattctgtaaagaattcggtattaaacataaaactggaattccttacaaccccatgggacaaggaatagttgaacgtgctcatcgcaccttaaagaattggctctttaagacaaaagaggggcagctatatcccccaaggtctccaaaggcccaccttgccttcaccttatttgtcctaaatttcttgcacaccgatatcaagggccagtctgcagcggatcgccactggcatccagttacttctaattcttatgcattggtaaaatggaaggaccccctgactaatgaatggaagggtccagatccagttctaatttggggtagaggctcagtttgtgttttttcacgagatgaagatggagcacggtggctgccagagagattaattcgtcagacgaacacagattctgactcttctggtaagtatcattctaaagactaaaattccttttgtgcttaaaattcagctgagagcaacagctctcaaagctgttctccagctactctctgagccagctcccgacaggaggccggagactagcctcagctttacaatttgcatttaaataaagtacctagacttccccgaaaaaagttctgcttttctactttctcactgtctttcaagattttgtctttcaagcaggtaaatcaacattctcgaggcggaccagcggatgtgcatccccgcccccctagagcactcaggtggcagctgttatccccagtctcaggacattccagcatgtggccttcagtctgagttaaaaattaggtttacccagaggactagaatagtagatatttctatattaataaagattggtttttattttgatagacaggcttagccccttagctgacctctggcttttcacccttgctgttactgcaaggtgtctttagctcaataaggctgtggaaaaaaacagggatgaggaggaacggctcccagctcctattttagccacaaatcgtggtgttactaacgacataattcttgcttaggctttgctaaatctgaggttgataattctcctttaggagctgcacagcgctcagaactgtgcatactgatttgtgatggtacaaattcagtatgggcatcgcttggtgcagatggaggtactgcaaggaaaggtcccagcttgaccatttctgagtttcctgtgagataaacccggtttgaaagaggttggtaccaaattatatatccctcggctctacctcgcctccccaaaaggtaccagagccacaggtgtggattttaacagaatccacgggaggaatcgggtccatgtccacccaagccaaggttaaaagcccactcatctacggatgagaaaatcatttgatcacctcagttaagcgctgccttattttaacttaattaataggggggagagagattggagacttactattgaaagggcaagcccttcactgcctcccacccaaataaaaaagccaattggccttgtactacagagctggccggaccccttatccctgttacccaccaatcatccaaaaatgcggaggaatatcaacttagtgttattcttattatagtgtatttcacacttgttcagtcaaacttagccagagttccaacgccctacttaaaattcaactagaaagttacctaccaagtactaattagcattataaagtcagagcctacagctccaggcttttcagttagttgtttactaagataagaaaagacagtcttagccagatacagtttaccataataaaagttaaagaatcccagggaagcaagttttttcttttagccctagattccaggcagaactattgagcatagataatttttccccctcaggccagctttttctttttttttaattttgttaataaaagggaggagatgtagtctcccctcccccagcctgaaacctgcttgctcaggggtggagcttcccgctcatcgctctgccacgcccactgctggaacctgcggagccacacacgtgcacctttctactggaccagagattattcggcgggaatcgggtcccctcccccttccttcataactagtgtcccaacaataaaatttgagctttgatcagaatgaatttgtcttggctccgtttcttctttcgccccgtctagattcctctcttacagctcgagtggccttctcagtcgaaccgttcacgttgcgagctgctggcggccgcaacaggggatccagacatgataagatacattgatgagtttggacaaaccacaactagaatgcagtgaaaaaaatgctttatttgtgaaatttgtgatgctattgctttatttgtaaccattataagctgcaataaacaagttaacaacaacaattgcattcattttatgtttcaggttcagggggaggtgtgggaggttttttcggatcctctagagtcgacctgcaggcatgcaagcttggcgtaatcatggtcatagctgtttcctgtgtgaaattgttatccgctcacaattccacacaacatacgagccggaagcataaagtgtaaagcctggggtgcctaatgagtgagctaactcacattaattgcgttgcgctcactgcccgctttccagtcgggaaacctgtcgtgccagctgcattaatgaatcggccaacgcgcggggagaggcggtttgcgtattgggcgctcttccgcttcctcgctcactgactcgctgcgctcggtcgttcggctgcggcgagcggtatcagctcactcaaaggcggtaatacggttatccacagaatcaggggataacgcaggaaagaacatgtgagcaaaaggccagcaaaaggccaggaaccgtaaaaaggccgcgttgctggcgtttttccataggctccgcccccctgacgagcatcacaaaaatcgacgctcaagtcagaggtggcgaaacccgacaggactataaagataccaggcgtttccccctggaagctccctcgtgcgctctcctgttccgaccctgccgcttaccggatacctgtccgcctttctcccttcgggaagcgtggcgctttctcatagctcacgctgtaggtatctcagttcggtgtaggtcgttcgctccaagctgggctgtgtgcacgaaccccccgttcagcccgaccgctgcgccttatccggtaactatcgtcttgagtccaacccggtaagacacgacttatcgccactggcagcagccactggtaacaggattagcagagcgaggtatgtaggcggtgctacagagttcttgaagtggtggcctaactacggctacactagaaggacagtatttggtatctgcgctctgctgaagccagttaccttcggaaaaagagttggtagctcttgatccggcaaacaaaccaccgctggtagcggtggtttttttgtttgcaagcagcagattacgcgcagaaaaaaaggatctcaagaagatcctttgatcttttctacggggtctgacgctcagtggaacgaaaactcacgttaagggattttggtcatgagattatcaaaaaggatcttcacctagatccttttaaattaaaaatgaagttttaaatcaatctaaagtatatatgagtaaacttggtctgacagttaccaatgcttaatcagtgaggcacctatctcagcgatctgtctatttcgttcatccatagttgcctgactccccgtcgtgtagataactacgatacgggagggcttaccatctggccccagtgctgcaatgataccgcgagacccacgctcaccggctccagatttatcagcaataaaccagccagccggaagggccgagcgcagaagtggtcctgcaactttatccgcctccatccagtctattaattgttgccgggaagctagagtaagtagttcgccagttaatagtttgcgcaacgttgttgccattgctacaggcatcgtggtgtcacgctcgtcgtttggtatggcttcattcagctccggttcccaacgatcaaggcgagttacatgatcccccatgttgtgcaaaaaagcggttagctccttcggtcctccgatcgttgtcagaagtaagttggccgcagtgttatcactcatggttatggcagcactgcataattctcttactgtcatgccatccgtaagatgcttttctgtgactggtgagtactcaaccaagtcattctgagaatagtgtatgcggcgaccgagttgctcttgcccggcgtcaatacgggataataccgcgccacatagcagaactttaaaagtgctcatcattggaaaacgttcttcggggcgaaaactctcaaggatcttaccgctgttgagatccagttcgatgtaacccactcgtgcacccaactgatcttcagcatcttttactttcaccagcgtttctgggtgagcaaaaacaggaaggcaaaatgccgcaaaaaagggaataagggcgacacggaaatgttgaatactcatactcttcctttttcaatattattgaagcatttatcagggttattgtctcatgagcggatacatatttgaatgtatttagaaaaataaacaaataggggttccgcgcacatttccccgaaaagtgccacctgacgtctaagaaaccattattatcatgacattaacctataaaaataggcgtatcacgaggccctttcgtctcgcgcgtttcggtgatgacggtgaaaacctctgacacatgcagctcccggagacggtcacagcttgtctgtaagcggatgccgggagcagacaagcccgtcagggcgcgtcagcgggtgttggcgggtgtcggggctggcttaactatgcggcatcagagcagattgtactgagagtgcaccatatgcggtgtgaaataccgcacagatgcgtaaggagaaaataccgcatcaggcgccattcgccattcaggctgcgcaactgttgggaagggcgatcggtgcgggcctcttcgctattacgccagctggcgaaagggggatgtgctgcaaggcgattaagttgggtaacgccagggttttcccagtcacgacgttgtaaaacgacggccagt

SEQ ID NO: 317 - DNA, 8143 bp, Artificial Sequence
  Description of Artificial Sequence: Synthetic polynucleotide
gaattcgagcttgcatgcctgcaggtcgttacataacttacggtaaatggcccgcctggctgaccgcccaacgacccccgcccattgacgtcaataatgacgtatgttcccatagtaacgccaatagggactttccattgacgtcaatgggtggagtatttacggtaaactgcccacttggcagtacatcaagtgtatcatatgccaagtacgccccctattgacgtcaatgacggtaaatggcccgcctggcattatgcccagtacatgaccttatgggactttcctacttggcagtacatctacgtattagtcatcgctattaccatggtgatgcggttttggcagtacatcaatgggcgtggatagcggtttgactcacggggatttccaagtctccaccccattgacgtcaatgggagtttgttttggcaccaaaatcaacgggactttccaaaatgtcgtaacaactccgccccattgacgcaaatgggcggtaggcgtgtacggtgggaggtctatataagcagagctcgtttagtgaaccgtcagagctttgatcagaatgaatttgtcttggctccgtttcttctttcgccccgtctagattcctctcttacagctcgagtggccttctcagtcgaaccgttcacgttgcgagctgctggcggccgcaacattttggcgccagaactgggacctgaagaatggcagagagatgctaagaggaacgctgctttggagctccacaggaaaggatcttcgtatcggacatcggagcaacggacaggtacacatgctagcgctagcttaaaatttcagttttgtaaagtgttgctgaggatgtggtaggatacgaattaagcttgaatcagtgctaacccaacgctggttctgcttgggtcagcagcgtgttaatcggaactagaaacggaaacaggcaggttagccgcagctttttaggaagctgcttaggtggaagaagaaagggtttaaagtcatggatcaggcggttgcccatagttttcaggagttgtttcaggccagaggagtaaggcttgaagtacaattagtaaaaaattttttaggtaagatagatagctgttgcccatggttcaaggaagaagaaacactagattgtggaacctgggagaaagttggtgaggccttaaaaatcactcaggcagataattttaccctaggcctctgggcactcataaatgatgcaataaaagatgccacttccccagggctaagttgcccccaggcggagcttgtggtatctcaggaggagtgcctgtcagagagggcctcctcagaaaaagatcttcttaactcaaaaattgataaatgtggaaactcggatgaaaaactgatttttaacaaaaatcactcagatagaggagctgcccattaccttaatgagaattggtcctcttgtgaatctcctgctcaacctgtagtccccacttcgggaggtgccactcatagggacacacgactaagcgagttagagtttgagattaagcttcagaggctgactaatgagcttcgggaactaaaaaagatgtcagaagcggagaagagtaactcttctgtagttcaccaggtgccgctagaaaaggttgtgagtcaggctcatgggaaaggacagaatatctctaatacgctagcctttcctgtggttgaggtagttgatcagcaagatactaggggcagacattaccagaccttagatttcaagttgataaaagagttaaaggcggctgttgtgcaatatggcccttcagccccattcactcaagcattactggacacagttgtggagtcacacttaacccctttagattggaagactctttctaaggctaccctgtcaggaggagattttttgctttgggattctgaatggcgagacgccagtaagaaaactgctgcttctaacgctcaggctggtaattcagactgggatagcaacatgcttttaggagagggcccttatgagggacagacaaatcagattgattttcccgttgcagtgtacgcgcaaattgcgacggccgcacgccgtgcttggggaaggttgccagtcaaaggagagattggtggaagtttagctagcattcggcagagttctgatgaaccatatcaggattttgtggacaggctattgatttcagctagtagaatccttggaaatccggacacgggaagtcctttcgttatgcaattggcttatgagaatgctaacgcaatttgccgagctgcgattcaaccgcataagggaacgacagatttggcgggatatgtccgtctttgcgcagacatcgggccttcctgcgagaccttgcagggaacccacgcgcaggcaatgttctctaggaaacgagggaatagtgcatgctttaaatgtggaagtttagatcattttagaattgattgtcctcagaacaagggcgccgaggttagacaaacaggccgtgccccgggaatatgtccccgatgtggaaagggccgccactgggcgaaagattgcaagcataaaacgagggttttgagccgcccggtgccgggaaacgaggaaaggggtcagccccaggccccaagttactcaaagaagacagcttatggggctctaaatctgctgcccagccaacaagatcagttcttgagcttgtcaggtcaaacccaggaaacgcaagactggacctctgttccactgtccatgcagcattaaccccagaagtgggagtccaaactctgcctaccggagtctttggaccactacctgtaggaacctgtggttttctcttaggacgaagcagttctattgtagaaggcctgcagatttatccaggtgttataagtaatgattatgagggagaaattaaaatcatagccgcttgccctcgtggtgctataactatacccgctaatcagaaaattgctcaacttaccttgatccccttgcgctggtcactatctaaattctctaaaaatgaagaaggacagattaactttgactcctctggcgtaaattgggtgaaatctatcactaatcagagacctaaccttaaattgattcttgatggaaaaagctttgaaggattaatagataccggggccgatgtaaccattattagagggcaggactggccctcaaactggcccctgtctgtttccttgactcaccttcaaggaattggttatgccagtaacccaaaacgtagttccaaattgctaacctggagagatgaggatggaaaatcaggaaatattcagccgtatgttatgcaaaatttgcctgtaaccctgtggggaagagatctgttgtcacagatgggcgttatcctgtgcagttctaaggaaatggtgactgaacagacgttcaggcagggacccctgcctgatcgtggactaataaagaagggacagaaaattaagacttttgaagatcttaaaccccactctaacgtgagaggtttaaagtattttcagtagtgtaaaattccttttgtgcttaaaattcagctgagagcaacagctctcaaagctgttctccagctactctctgagccagctcccgacaggaggccggagactagcctcagctttacaatttgcatttaaataaagtacctagacttccccgaaaaaagttctgcttttctactttctcactgtctttcaagattttgtctttcaagcaggtaaatcaacattctcgaggcggaccagcggatgtgcatccccgcccccctagagcactcaggtggcagctgttatccccagtctcaggacattccagcatgtggccttcagtctgagttaaaaattaggtttacccagaggactagaatagtagatatttctatattaataaagattggtttttattttgatagacaggcttagccccttagctgacctctggcttttcacccttgctgttactgcaaggtgtctttagctcaataaggctgtggaaaaaaacagggatgaggaggaacggctcccagctcctattttagccacaaatcgtggtgttactaacgacataattcttgcttaggctttgctaaatctgaggttgataattctcctttaggagctgcacagcgctcagaactgtgcatactgatttgtgatggtacaaattcagtatgggcatcgcttggtgcagatggaggtactgcaaggaaaggtcccagcttgaccatttctgagtttcctgtgagataaacccggtttgaaagaggttggtaccaaattatatatccctcggctctacctcgcctccccaaaaggtaccagagccacaggtgtggattttaacagaatccacgggaggaatcgggtccatgtccacccaagccaaggttaaaagcccactcatctacggatgagaaaatcatttgatcacctcagttaagcgctgccttattttaacttaattaataggggggagagagattggagacttactattgaaagggcaagcccttcactgcctcccacccaaataaaaaagccaattggccttgtactacagagctggccggaccccttatccctgttacccaccaatcatccaaaaatgcggaggaatatcaacttagtgttattcttattatagtgtatttcacacttgttcagtcaaacttagccagagttccaacgccctacttaaaattcaactagaaagttacctaccaagtactaattagcattataaagtcagagcctacagctccaggcttttcagttagttgtttactaagataagaaaagacagtcttagccagatacagtttaccataataaaagttaaagaatcccagggaagcaagttttttcttttagccctagattccaggcagaactattgagcatagataatttttccccctcaggccagctttttctttttttttaattttgttaataaaagggaggagatgtagtctcccctcccccagcctgaaacctgcttgctcaggggtggagcttcccgctcatcgctctgccacgcccactgctggaacctgcggagccacacacgtgcacctttctactggaccagagattattcggcgggaatcgggtcccctcccccttccttcataactagtgtcccaacaataaaatttgagctttgatcagaatgaatttgtcttggctccgtttcttctttcgccccgtctagattcctctcttacagctcgagtggccttctcagtcgaaccgttcacgttgcgagctgctggcggccgcaacaggggatccagacatgataagatacattgatgagtttggacaaaccacaactagaatgcagtgaaaaaaatgctttatttgtgaaatttgtgatgctattgctttatttgtaaccattataagctgcaataaacaagttaacaacaacaattgcattcattttatgtttcaggttcagggggaggtgtgggaggttttttcggatcctctagagtcgacctgcaggcatgcaagcttggcgtaatcatggtcatagctgtttcctgtgtgaaattgttatccgctcacaattccacacaacatacgagccggaagcataaagtgtaaagcctggggtgcctaatgagtgagctaactcacattaattgcgttgcgctcactgcccgctttccagtcgggaaacctgtcgtgccagctgcattaatgaatcggccaacgcgcggggagaggcggtttgcgtattgggcgctcttccgcttcctcgctcactgactcgctgcgctcggtcgttcggctgcggcgagcggtatcagctcactcaaaggcggtaatacggttatccacagaatcaggggataacgcaggaaagaacatgtgagcaaaaggccagcaaaaggccaggaaccgtaaaaaggccgcgttgctggcgtttttccataggctccgcccccctgacgagcatcacaaaaatcgacgctcaagtcagaggtggcgaaacccgacaggactataaagataccaggcgtttccccctggaagctccctcgtgcgctctcctgttccgaccctgccgcttaccggatacctgtccgcctttctcccttcgggaagcgtggcgctttctcatagctcacgctgtaggtatctcagttcggtgtaggtcgttcgctccaagctgggctgtgtgcacgaaccccccgttcagcccgaccgctgcgccttatccggtaactatcgtcttgagtccaacccggtaagacacgacttatcgccactggcagcagccactggtaacaggattagcagagcgaggtatgtaggcggtgctacagagttcttgaagtggtggcctaactacggctacactagaaggacagtatttggtatctgcgctctgctgaagccagttaccttcggaaaaagagttggtagctcttgatccggcaaacaaaccaccgctggtagcggtggtttttttgtttgcaagcagcagattacgcgcagaaaaaaaggatctcaagaagatcctttgatcttttctacggggtctgacgctcagtggaacgaaaactcacgttaagggattttggtcatgagattatcaaaaaggatcttcacctagatccttttaaattaaaaatgaagttttaaatcaatctaaagtatatatgagtaaacttggtctgacagttaccaatgcttaatcagtgaggcacctatctcagcgatctgtctatttcgttcatccatagttgcctgactccccgtcgtgtagataactacgatacgggagggcttaccatctggccccagtgctgcaatgataccgcgagacccacgctcaccggctccagatttatcagcaataaaccagccagccggaagggccgagcgcagaagtggtcctgcaactttatccgcctccatccagtctattaattgttgccgggaagctagagtaagtagttcgccagttaatagtttgcgcaacgttgttgccattgctacaggcatcgtggtgtcacgctcgtcgtttggtatggcttcattcagctccggttcccaacgatcaaggcgagttacatgatcccccatgttgtgcaaaaaagcggttagctccttcggtcctccgatcgttgtcagaagtaagttggccgcagtgttatcactcatggttatggcagcactgcataattctcttactgtcatgccatccgtaagatgcttttctgtgactggtgagtactcaaccaagtcattctgagaatagtgtatgcggcgaccgagttgctcttgcccggcgtcaatacgggataataccgcgccacatagcagaactttaaaagtgctcatcattggaaaacgttcttcggggcgaaaactctcaaggatcttaccgctgttgagatccagttcgatgtaacccactcgtgcacccaactgatcttcagcatcttttactttcaccagcgtttctgggtgagcaaaaacaggaaggcaaaatgccgcaaaaaagggaataagggcgacacggaaatgttgaatactcatactcttcctttttcaatattattgaagcatttatcagggttattgtctcatgagcggatacatatttgaatgtatttagaaaaataaacaaataggggttccgcgcacatttccccgaaaagtgccacctgacgtctaagaaaccattattatcatgacattaacctataaaaataggcgtatcacgaggccctttcgtctcgcgcgtttcggtgatgacggtgaaaacctctgacacatgcagctcccggagacggtcacagcttgtctgtaagcggatgccgggagcagacaagcccgtcagggcgcgtcagcgggtgttggcgggtgtcggggctggcttaactatgcggcatcagagcagattgtactgagagtgcaccatatgcggtgtgaaataccgcacagatgcgtaaggagaaaataccgcatcaggcgccattcgccattcaggctgcgcaactgttgggaagggcgatcggtgcgggcctcttcgctattacgccagctggcgaaagggggatgtgctgcaaggcgattaagttgggtaacgccagggttttcccagtcacgacgttgtaaaacgacggccagt

SEQ ID NO: 318 - DNA, 8141 bp, Artificial Sequence
  Description of Artificial Sequence: Synthetic polynucleotide
gaattcgagcttgcatgcctgcaggtcgttacataacttacggtaaatggcccgcctggctgaccgcccaacgacccccgcccattgacgtcaataatgacgtatgttcccatagtaacgccaatagggactttccattgacgtcaatgggtggagtatttacggtaaactgcccacttggcagtacatcaagtgtatcatatgccaagtacgccccctattgacgtcaatgacggtaaatggcccgcctggcattatgcccagtacatgaccttatgggactttcctacttggcagtacatctacgtattagtcatcgctattaccatggtgatgcggttttggcagtacatcaatgggcgtggatagcggtttgactcacggggatttccaagtctccaccccattgacgtcaatgggagtttgttttggcaccaaaatcaacgggactttccaaaatgtcgtaacaactccgccccattgacgcaaatgggcggtaggcgtgtacggtgggaggtctatataagcagagctcgtttagtgaaccgtcagctttgatcagaatgaatttgtcttggctccgtttcttctttcgccccgtctagattcctctcttacagctcgagtggccttctcagtcgaaccgttcacgttgcgagctgctggcggccgcaacattttggcgccagaactgggacctgaagaatggcagagagatgctaagaggaacgctgctttggagctccacaggaaaggatcttcgtatcggacatcggagcaacggacaggtacacatgctagcgctagcttaaaatttcagttttgtaaagtgttgctgaggatgtggtaggatacgaattaagcttgaatcagtgctaacccaacgctggttctgcttgggtcagcagcgtgttaatcggaactagaaacggaaacaggcaggttagccgcagctttttaggaagctgcttaggtggaagaagaaagggtttaaagtcatggatcaggcggttgcccatagttttcaggagttgtttcaggccagaggagtaaggcttgaagtacaattagtaaaaaattttttaggtaagatagatagctgttgcccatggttcaaggaagaagaaacactagattgtggaacctgggagaaagttggtgaggccttaaaaatcactcaggcagataattttaccctaggcctctgggcactcataaatgatgcaataaaagatgccacttccccagggctaagttgcccccaggcggagcttgtggtatctcaggaggagtgcctgtcagagagggcctcctcagaaaaagatcttcttaactcaaaaattgataaatgtggaaactcggatgaaaaactgatttttaacaaaaatcactcagatagaggagctgcccattaccttaatgagaattggtcctcttgtgaatctcctgctcaacctgtagtccccacttcgggaggtgccactcatagggacacacgactaagcgagttagagtttgagattaagcttcagaggctgactaatgagcttcgggaactaaaaaagatgtcagaagcggagaagagtaactcttctgtagttcaccaggtgccgctagaaaaggttgtgagtcaggctcatgggaaaggacagaatatctctaatacgctagcctttcctgtggttgaggtagttgatcagcaagatactaggggcagacattaccagaccttagatttcaagttgataaaagagttaaaggcggctgttgtgcaatatggcccttcagccccattcactcaagcattactggacacagttgtggagtcacacttaacccctttagattggaagactctttctaaggctaccctgtcaggaggagattttttgctttgggattctgaatggcgagacgccagtaagaaaactgctgcttctaacgctcaggctggtaattcagactgggatagcaacatgcttttaggagagggcccttatgagggacagacaaatcagattgattttcccgttgcagtgtacgcgcaaattgcgacggccgcacgccgtgcttggggaaggttgccagtcaaaggagagattggtggaagtttagctagcattcggcagagttctgatgaaccatatcaggattttgtggacaggctattgatttcagctagtagaatccttggaaatccggacacgggaagtcctttcgttatgcaattggcttatgagaatgctaacgcaatttgccgagctgcgattcaaccgcataagggaacgacagatttggcgggatatgtccgtctttgcgcagacatcgggccttcctgcgagaccttgcagggaacccacgcgcaggcaatgttctctaggaaacgagggaatagtgcatgctttaaatgtggaagtttagatcattttagaattgattgtcctcagaacaagggcgccgaggttagacaaacaggccgtgccccgggaatatgtccccgatgtggaaagggccgccactgggcgaaagattgcaagcataaaacgagggttttgagccgcccggtgccgggaaacgaggaaaggggtcagccccaggccccaagttactcaaagaagacagcttatggggctctaaatctgctgcccagccaacaagatcagttcttgagcttgtcaggtcaaacccaggaaacgcaagactggacctctgttccactgtccatgcagcattaaccccagaagtgggagtccaaactctgcctaccggagtctttggaccactacctgtaggaacctgtggttttctcttaggacgaagcagttctattgtagaaggcctgcagatttatccaggtgttataagtaatgattatgagggagaaattaaaatcatagccgcttgccctcgtggtgctataactatacccgctaatcagaaaattgctcaacttaccttgatccccttgcgctggtcactatctaaattctctaaaaatgaagaaggacagattaactttgactcctctggcgtaaattgggtgaaatctatcactaatcagagacctaaccttaaattgattcttgatggaaaaagctttgaaggattaatagataccggggccgatgtaaccattattagagggcaggactggccctcaaactggcccctgtctgtttccttgactcaccttcaaggaattggttatgccagtaacccaaaacgtagttccaaattgctaacctggagagatgaggatggaaaatcaggaaatattcagccgtatgttatgcaaaatttgcctgtaaccctgtggggaagagatctgttgtcacagatgggcgttatcctgtgcagttctaaggaaatggtgactgaacagacgttcaggcagggacccctgcctgatcgtggactaataaagaagggacagaaaattaagacttttgaagatcttaaaccccactctaacgtgagaggtttaaagtattttcagtagtgtaaaattccttttgtgcttaaaattcagctgagagcaacagctctcaaagctgttctccagctactctctgagccagctcccgacaggaggccggagactagcctcagctttacaatttgcatttaaataaagtacctagacttccccgaaaaaagttctgcttttctactttctcactgtctttcaagattttgtctttcaagcaggtaaatcaacattctcgaggcggaccagcggatgtgcatccccgcccccctagagcactcaggtggcagctgttatccccagtctcaggacattccagcatgtggccttcagtctgagttaaaaattaggtttacccagaggactagaatagtagatatttctatattaataaagattggtttttattttgatagacaggcttagccccttagctgacctctggcttttcacccttgctgttactgcaaggtgtctttagctcaataaggctgtggaaaaaaacagggatgaggaggaacggctcccagctcctattttagccacaaatcgtggtgttactaacgacataattcttgcttaggctttgctaaatctgaggttgataattctcctttaggagctgcacagcgctcagaactgtgcatactgatttgtgatggtacaaattcagtatgggcatcgcttggtgcagatggaggtactgcaaggaaaggtcccagcttgaccatttctgagtttcctgtgagataaacccggtttgaaagaggttggtaccaaattatatatccctcggctctacctcgcctccccaaaaggtaccagagccacaggtgtggattttaacagaatccacgggaggaatcgggtccatgtccacccaagccaaggttaaaagcccactcatctacggatgagaaaatcatttgatcacctcagttaagcgctgccttattttaacttaattaataggggggagagagattggagacttactattgaaagggcaagcccttcactgcctcccacccaaataaaaaagccaattggccttgtactacagagctggccggaccccttatccctgttacccaccaatcatccaaaaatgcggaggaatatcaacttagtgttattcttattatagtgtatttcacacttgttcagtcaaacttagccagagttccaacgccctacttaaaattcaactagaaagttacctaccaagtactaattagcattataaagtcagagcctacagctccaggcttttcagttagttgtttactaagataagaaaagacagtcttagccagatacagtttaccataataaaagttaaagaatcccagggaagcaagttttttcttttagccctagattccaggcagaactattgagcatagataatttttccccctcaggccagctttttctttttttttaattttgttaataaaagggaggagatgtagtctcccctcccccagcctgaaacctgcttgctcaggggtggagcttcccgctcatcgctctgccacgcccactgctggaacctgcggagccacacacgtgcacctttctactggaccagagattattcggcgggaatcgggtcccctcccccttccttcataactagtgtcccaacaataaaatttgagctttgatcagaatgaatttgtcttggctccgtttcttctttcgccccgtctagattcctctcttacagctcgagtggccttctcagtcgaaccgttcacgttgcgagctgctggcggccgcaacaggggatccagacatgataagatacattgatgagtttggacaaaccacaactagaatgcagtgaaaaaaatgctttatttgtgaaatttgtgatgctattgctttatttgtaaccattataagctgcaataaacaagttaacaacaacaattgcattcattttatgtttcaggttcagggggaggtgtgggaggttttttcggatcctctagagtcgacctgcaggcatgcaagcttggcgtaatcatggtcatagctgtttcctgtgtgaaattgttatccgctcacaattccacacaacatacgagccggaagcataaagtgtaaagcctggggtgcctaatgagtgagctaactcacattaattgcgttgcgctcactgcccgctttccagtcgggaaacctgtcgtgccagctgcattaatgaatcggccaacgcgcggggagaggcggtttgcgtattgggcgctcttccgcttcctcgctcactgactcgctgcgctcggtcgttcggctgcggcgagcggtatcagctcactcaaaggcggtaatacggttatccacagaatcaggggataacgcaggaaagaacatgtgagcaaaaggccagcaaaaggccaggaaccgtaaaaaggccgcgttgctggcgtttttccataggctccgcccccctgacgagcatcacaaaaatcgacgctcaagtcagaggtggcgaaacccgacaggactataaagataccaggcgtttccccctggaagctccctcgtgcgctctcctgttccgaccctgccgcttaccggatacctgtccgcctttctcccttcgggaagcgtggcgctttctcatagctcacgctgtaggtatctcagttcggtgtaggtcgttcgctccaagctgggctgtgtgcacgaaccccccgttcagcccgaccgctgcgccttatccggtaactatcgtcttgagtccaacccggtaagacacgacttatcgccactggcagcagccactggtaacaggattagcagagcgaggtatgtaggcggtgctacagagttcttgaagtggtggcctaactacggctacactagaaggacagtatttggtatctgcgctctgctgaagccagttaccttcggaaaaagagttggtagctcttgatccggcaaacaaaccaccgctggtagcggtggtttttttgtttgcaagcagcagattacgcgcagaaaaaaaggatctcaagaagatcctttgatcttttctacggggtctgacgctcagtggaacgaaaactcacgttaagggattttggtcatgagattatcaaaaaggatcttcacctagatccttttaaattaaaaatgaagttttaaatcaatctaaagtatatatgagtaaacttggtctgacagttaccaatgcttaatcagtgaggcacctatctcagcgatctgtctatttcgttcatccatagttgcctgactccccgtcgtgtagataactacgatacgggagggcttaccatctggccccagtgctgcaatgataccgcgagacccacgctcaccggctccagatttatcagcaataaaccagccagccggaagggccgagcgcagaagtggtcctgcaactttatccgcctccatccagtctattaattgttgccgggaagctagagtaagtagttcgccagttaatagtttgcgcaacgttgttgccattgctacaggcatcgtggtgtcacgctcgtcgtttggtatggcttcattcagctccggttcccaacgatcaaggcgagttacatgatcccccatgttgtgcaaaaaagcggttagctccttcggtcctccgatcgttgtcagaagtaagttggccgcagtgttatcactcatggttatggcagcactgcataattctcttactgtcatgccatccgtaagatgcttttctgtgactggtgagtactcaaccaagtcattctgagaatagtgtatgcggcgaccgagttgctcttgcccggcgtcaatacgggataataccgcgccacatagcagaactttaaaagtgctcatcattggaaaacgttcttcggggcgaaaactctcaaggatcttaccgctgttgagatccagttcgatgtaacccactcgtgcacccaactgatcttcagcatcttttactttcaccagcgtttctgggtgagcaaaaacaggaaggcaaaatgccgcaaaaaagggaataagggcgacacggaaatgttgaatactcatactcttcctttttcaatattattgaagcatttatcagggttattgtctcatgagcggatacatatttgaatgtatttagaaaaataaacaaataggggttccgcgcacatttccccgaaaagtgccacctgacgtctaagaaaccattattatcatgacattaacctataaaaataggcgtatcacgaggccctttcgtctcgcgcgtttcggtgatgacggtgaaaacctctgacacatgcagctcccggagacggtcacagcttgtctgtaagcggatgccgggagcagacaagcccgtcagggcgcgtcagcgggtgttggcgggtgtcggggctggcttaactatgcggcatcagagcagattgtactgagagtgcaccatatgcggtgtgaaataccgcacagatgcgtaaggagaaaataccgcatcaggcgccattcgccattcaggctgcgcaactgttgggaagggcgatcggtgcgggcctcttcgctattacgccagctggcgaaagggggatgtgctgcaaggcgattaagttgggtaacgccagggttttcccagtcacgacgttgtaaaacgacggccagt

SEQ ID NO: 319 - DNA, 8126 bp, Artificial Sequence
  Description of Artificial Sequence: Synthetic polynucleotide
gaattcgagcttgcatgcctgcaggtcgttacataacttacggtaaatggcccgcctggctgaccgcccaacgacccccgcccattgacgtcaataatgacgtatgttcccatagtaacgccaatagggactttccattgacgtcaatgggtggagtatttacggtaaactgcccacttggcagtacatcaagtgtatcatatgccaagtacgccccctattgacgtcaatgacggtaaatggcccgcctggcattatgcccagtacatgaccttatgggactttcctacttggcagtacatctacgtattagtcatcgctattaccatggtgatgcggttttggcagtacatcaatgggcgtggatagcggtttgactcacggggatttccaagtctccaccccattgacgtcaatgggagtttgttttggcaccaaaatcaacgggactttccaaaatgtcgtaacaactccgccccattgacgcaaatgggcggtaggcgtgtacggtgggaggtctatataagcagagctgagctttgatcagaatgaatttgtcttggctccgtttcttctttcgccccgtctagattcctctcttacagctcgagtggccttctcagtcgaaccgttcacgttgcgagctgctggcggccgcaacattttggcgccagaactgggacctgaagaatggcagagagatgctaagaggaacgctgctttggagctccacaggaaaggatcttcgtatcggacatcggagcaacggacaggtacacatgctagcgctagcttaaaatttcagttttgtaaagtgttgctgaggatgtggtaggatacgaattaagcttgaatcagtgctaacccaacgctggttctgcttgggtcagcagcgtgttaatcggaactagaaacggaaacaggcaggttagccgcagctttttaggaagctgcttaggtggaagaagaaagggtttaaagtcatggatcaggcggttgcccatagttttcaggagttgtttcaggccagaggagtaaggcttgaagtacaattagtaaaaaattttttaggtaagatagatagctgttgcccatggttcaaggaagaagaaacactagattgtggaacctgggagaaagttggtgaggccttaaaaatcactcaggcagataattttaccctaggcctctgggcactcataaatgatgcaataaaagatgccacttccccagggctaagttgcccccaggcggagcttgtggtatctcaggaggagtgcctgtcagagagggcctcctcagaaaaagatcttcttaactcaaaaattgataaatgtggaaactcggatgaaaaactgatttttaacaaaaatcactcagatagaggagctgcccattaccttaatgagaattggtcctcttgtgaatctcctgctcaacctgtagtccccacttcgggaggtgccactcatagggacacacgactaagcgagttagagtttgagattaagcttcagaggctgactaatgagcttcgggaactaaaaaagatgtcagaagcggagaagagtaactcttctgtagttcaccaggtgccgctagaaaaggttgtgagtcaggctcatgggaaaggacagaatatctctaatacgctagcctttcctgtggttgaggtagttgatcagcaagatactaggggcagacattaccagaccttagatttcaagttgataaaagagttaaaggcggctgttgtgcaatatggcccttcagccccattcactcaagcattactggacacagttgtggagtcacacttaacccctttagattggaagactctttctaaggctaccctgtcaggaggagattttttgctttgggattctgaatggcgagacgccagtaagaaaactgctgcttctaacgctcaggctggtaattcagactgggatagcaacatgcttttaggagagggcccttatgagggacagacaaatcagattgattttcccgttgcagtgtacgcgcaaattgcgacggccgcacgccgtgcttggggaaggttgccagtcaaaggagagattggtggaagtttagctagcattcggcagagttctgatgaaccatatcaggattttgtggacaggctattgatttcagctagtagaatccttggaaatccggacacgggaagtcctttcgttatgcaattggcttatgagaatgctaacgcaatttgccgagctgcgattcaaccgcataagggaacgacagatttggcgggatatgtccgtctttgcgcagacatcgggccttcctgcgagaccttgcagggaacccacgcgcaggcaatgttctctaggaaacgagggaatagtgcatgctttaaatgtggaagtttagatcattttagaattgattgtcctcagaacaagggcgccgaggttagacaaacaggccgtgccccgggaatatgtccccgatgtggaaagggccgccactgggcgaaagattgcaagcataaaacgagggttttgagccgcccggtgccgggaaacgaggaaaggggtcagccccaggccccaagttactcaaagaagacagcttatggggctctaaatctgctgcccagccaacaagatcagttcttgagcttgtcaggtcaaacccaggaaacgcaagactggacctctgttccactgtccatgcagcattaaccccagaagtgggagtccaaactctgcctaccggagtctttggaccactacctgtaggaacctgtggttttctcttaggacgaagcagttctattgtagaaggcctgcagatttatccaggtgttataagtaatgattatgagggagaaattaaaatcatagccgcttgccctcgtggtgctataactatacccgctaatcagaaaattgctcaacttaccttgatccccttgcgctggtcactatctaaattctctaaaaatgaagaaggacagattaactttgactcctctggcgtaaattgggtgaaatctatcactaatcagagacctaaccttaaattgattcttgatggaaaaagctttgaaggattaatagataccggggccgatgtaaccattattagagggcaggactggccctcaaactggcccctgtctgtttccttgactcaccttcaaggaattggttatgccagtaacccaaaacgtagttccaaattgctaacctggagagatgaggatggaaaatcaggaaatattcagccgtatgttatgcaaaatttgcctgtaaccctgtggggaagagatctgttgtcacagatgggcgttatcctgtgcagttctaaggaaatggtgactgaacagacgttcaggcagggacccctgcctgatcgtggactaataaagaagggacagaaaattaagacttttgaagatcttaaaccccactctaacgtgagaggtttaaagtattttcagtagtgtaaaattccttttgtgcttaaaattcagctgagagcaacagctctcaaagctgttctccagctactctctgagccagctcccgacaggaggccggagactagcctcagctttacaatttgcatttaaataaagtacctagacttccccgaaaaaagttctgcttttctactttctcactgtctttcaagattttgtctttcaagcaggtaaatcaacattctcgaggcggaccagcggatgtgcatccccgcccccctagagcactcaggtggcagctgttatccccagtctcaggacattccagcatgtggccttcagtctgagttaaaaattaggtttacccagaggactagaatagtagatatttctatattaataaagattggtttttattttgatagacaggcttagccccttagctgacctctggcttttcacccttgctgttactgcaaggtgtctttagctcaataaggctgtggaaaaaaacagggatgaggaggaacggctcccagctcctattttagccacaaatcgtggtgttactaacgacataattcttgcttaggctttgctaaatctgaggttgataattctcctttaggagctgcacagcgctcagaactgtgcatactgatttgtgatggtacaaattcagtatgggcatcgcttggtgcagatggaggtactgcaaggaaaggtcccagcttgaccatttctgagtttcctgtgagataaacccggtttgaaagaggttggtaccaaattatatatccctcggctctacctcgcctccccaaaaggtaccagagccacaggtgtggattttaacagaatccacgggaggaatcgggtccatgtccacccaagccaaggttaaaagcccactcatctacggatgagaaaatcatttgatcacctcagttaagcgctgccttattttaacttaattaataggggggagagagattggagacttactattgaaagggcaagcccttcactgcctcccacccaaataaaaaagccaattggccttgtactacagagctggccggaccccttatccctgttacccaccaatcatccaaaaatgcggaggaatatcaacttagtgttattcttattatagtgtatttcacacttgttcagtcaaacttagccagagttccaacgccctacttaaaattcaactagaaagttacctaccaagtactaattagcattataaagtcagagcctacagctccaggcttttcagttagttgtttactaagataagaaaagacagtcttagccagatacagtttaccataataaaagttaaagaatcccagggaagcaagttttttcttttagccctagattccaggcagaactattgagcatagataatttttccccctcaggccagctttttctttttttttaattttgttaataaaagggaggagatgtagtctcccctcccccagcctgaaacctgcttgctcaggggtggagcttcccgctcatcgctctgccacgcccactgctggaacctgcggagccacacacgtgcacctttctactggaccagagattattcggcgggaatcgggtcccctcccccttccttcataactagtgtcccaacaataaaatttgagctttgatcagaatgaatttgtcttggctccgtttcttctttcgccccgtctagattcctctcttacagctcgagtggccttctcagtcgaaccgttcacgttgcgagctgctggcggccgcaacaggggatccagacatgataagatacattgatgagtttggacaaaccacaactagaatgcagtgaaaaaaatgctttatttgtgaaatttgtgatgctattgctttatttgtaaccattataagctgcaataaacaagttaacaacaacaattgcattcattttatgtttcaggttcagggggaggtgtgggaggttttttcggatcctctagagtcgacctgcaggcatgcaagcttggcgtaatcatggtcatagctgtttcctgtgtgaaattgttatccgctcacaattccacacaacatacgagccggaagcataaagtgtaaagcctggggtgcctaatgagtgagctaactcacattaattgcgttgcgctcactgcccgctttccagtcgggaaacctgtcgtgccagctgcattaatgaatcggccaacgcgcggggagaggcggtttgcgtattgggcgctcttccgcttcctcgctcactgactcgctgcgctcggtcgttcggctgcggcgagcggtatcagctcactcaaaggcggtaatacggttatccacagaatcaggggataacgcaggaaagaacatgtgagcaaaaggccagcaaaaggccaggaaccgtaaaaaggccgcgttgctggcgtttttccataggctccgcccccctgacgagcatcacaaaaatcgacgctcaagtcagaggtggcgaaacccgacaggactataaagataccaggcgtttccccctggaagctccctcgtgcgctctcctgttccgaccctgccgcttaccggatacctgtccgcctttctcccttcgggaagcgtggcgctttctcatagctcacgctgtaggtatctcagttcggtgtaggtcgttcgctccaagctgggctgtgtgcacgaaccccccgttcagcccgaccgctgcgccttatccggtaactatcgtcttgagtccaacccggtaagacacgacttatcgccactggcagcagccactggtaacaggattagcagagcgaggtatgtaggcggtgctacagagttcttgaagtggtggcctaactacggctacactagaaggacagtatttggtatctgcgctctgctgaagccagttaccttcggaaaaagagttggtagctcttgatccggcaaacaaaccaccgctggtagcggtggtttttttgtttgcaagcagcagattacgcgcagaaaaaaaggatctcaagaagatcctttgatcttttctacggggtctgacgctcagtggaacgaaaactcacgttaagggattttggtcatgagattatcaaaaaggatcttcacctagatccttttaaattaaaaatgaagttttaaatcaatctaaagtatatatgagtaaacttggtctgacagttaccaatgcttaatcagtgaggcacctatctcagcgatctgtctatttcgttcatccatagttgcctgactccccgtcgtgtagataactacgatacgggagggcttaccatctggccccagtgctgcaatgataccgcgagacccacgctcaccggctccagatttatcagcaataaaccagccagccggaagggccgagcgcagaagtggtcctgcaactttatccgcctccatccagtctattaattgttgccgggaagctagagtaagtagttcgccagttaatagtttgcgcaacgttgttgccattgctacaggcatcgtggtgtcacgctcgtcgtttggtatggcttcattcagctccggttcccaacgatcaaggcgagttacatgatcccccatgttgtgcaaaaaagcggttagctccttcggtcctccgatcgttgtcagaagtaagttggccgcagtgttatcactcatggttatggcagcactgcataattctcttactgtcatgccatccgtaagatgcttttctgtgactggtgagtactcaaccaagtcattctgagaatagtgtatgcggcgaccgagttgctcttgcccggcgtcaatacgggataataccgcgccacatagcagaactttaaaagtgctcatcattggaaaacgttcttcggggcgaaaactctcaaggatcttaccgctgttgagatccagttcgatgtaacccactcgtgcacccaactgatcttcagcatcttttactttcaccagcgtttctgggtgagcaaaaacaggaaggcaaaatgccgcaaaaaagggaataagggcgacacggaaatgttgaatactcatactcttcctttttcaatattattgaagcatttatcagggttattgtctcatgagcggatacatatttgaatgtatttagaaaaataaacaaataggggttccgcgcacatttccccgaaaagtgccacctgacgtctaagaaaccattattatcatgacattaacctataaaaataggcgtatcacgaggccctttcgtctcgcgcgtttcggtgatgacggtgaaaacctctgacacatgcagctcccggagacggtcacagcttgtctgtaagcggatgccgggagcagacaagcccgtcagggcgcgtcagcgggtgttggcgggtgtcggggctggcttaactatgcggcatcagagcagattgtactgagagtgcaccatatgcggtgtgaaataccgcacagatgcgtaaggagaaaataccgcatcaggcgccattcgccattcaggctgcgcaactgttgggaagggcgatcggtgcgggcctcttcgctattacgccagctggcgaaagggggatgtgctgcaaggcgattaagttgggtaacgccagggttttcccagtcacgacgttgtaaaacgacggccagt

SEQ ID NO: 320 - DNA, 10717 bp, Artificial Sequence
  Description of Artificial Sequence: Synthetic polynucleotide
gaattcgagcttgcatgcctgcaggtcgttacataacttacggtaaatggcccgcctggctgaccgcccaacgacccccgcccattgacgtcaataatgacgtatgttcccatagtaacgccaatagggactttccattgacgtcaatgggtggagtatttacggtaaactgcccacttggcagtacatcaagtgtatcatatgccaagtacgccccctattgacgtcaatgacggtaaatggcccgcctggcattatgcccagtacatgaccttatgggactttcctacttggcagtacatctacgtattagtcatcgctattaccatggtgatgcggttttggcagtacatcaatgggcgtggatagcggtttgactcacggggatttccaagtctccaccccattgacgtcaatgggagtttgttttggcaccaaaatcaacgggactttccaaaatgtcgtaacaactccgccccattgacgcaaatgggcggtaggcgtgtacggtgggaggtctatataagcagagctcgtttagtgaaccgtcagagctttgatcagaatgaatttgtcttggctccgtttcttctttcgccccgtctagattcctctcttacagctcgagtggccttctcagtcgaaccgttcacgttgcgagctgctggcggccgcaacattttagcgactaaacacatcactgaagaatccgagagagatgctaagaggaacgctgctttggagctccacaggaaaggatcttcgtatcggacatcggagcaacggacaggtacacatgctagcgctagcttaaaatttcagttttgtaaagtgttgctgaggatgtggtaggatacgaattaagcttgaatcagtgctaacccaacgctggttctgcttgggtcagcagcgtgttaatcggaactagaaacggaaacaggcaggttagccgcagctttttaggaagctgcttaggtggaagaagaaagggtttaaagtcatggatcaggcggttgcccatagttttcaggagttgtttcaggccagaggagtaaggcttgaagtacaattagtaaaaaattttttaggtaagatagatagctgttgcccatggttcaaggaagaagaaacactagattgtggaacctgggagaaagttggtgaggccttaaaaatcactcaggcagataattttaccctaggcctctgggcactcataaatgatgcaataaaagatgccacttccccagggctaagttgcccccaggcggagcttgtggtatctcaggaggagtgcctgtcagagagggcctcctcagaaaaagatcttcttaactcaaaaattgataaatgtggaaactcggatgaaaaactgatttttaacaaaaatcactcagatagaggagctgcccattaccttaatgagaattggtcctcttgtgaatctcctgctcaacctgtagtccccacttcgggaggtgccactcatagggacacacgactaagcgagttagagtttgagattaagcttcagaggctgactaatgagcttcgggaactaaaaaagatgtcagaagcggagaagagtaactcttctgtagttcaccaggtgccgctagaaaaggttgtgagtcaggctcatgggaaaggacagaatatctctaatacgctagcctttcctgtggttgaggtagttgatcagcaagatactaggggcagacattaccagaccttagatttcaagttgataaaagagttaaaggcggctgttgtgcaatatggcccttcagccccattcactcaagcattactggacacagttgtggagtcacacttaacccctttagattggaagactctttctaaggctaccctgtcaggaggagattttttgctttgggattctgaatggcgagacgccagtaagaaaactgctgcttctaacgctcaggctggtaattcagactgggatagcaacatgcttttaggagagggcccttatgagggacagacaaatcagattgattttcccgttgcagtgtacgcgcaaattgcgacggccgcacgccgtgcttggggaaggttgccagtcaaaggagagattggtggaagtttagctagcattcggcagagttctgatgaaccatatcaggattttgtggacaggctattgatttcagctagtagaatccttggaaatccggacacgggaagtcctttcgttatgcaattggcttatgagaatgctaacgcaatttgccgagctgcgattcaaccgcataagggaacgacagatttggcgggatatgtccgtctttgcgcagacatcgggccttcctgcgagaccttgcagggaacccacgcgcaggcaatgttctctaggaaacgagggaatagtgcatgctttaaatgtggaagtttagatcattttagaattgattgtcctcagaacaagggcgccgaggttagacaaacaggccgtgccccgggaatatgtccccgatgtggaaagggccgccactgggcgaaagattgcaagcataaaacgagggttttgagccgcccggtgccgggaaacgaggaaaggggtcagccccaggccccaagttactcaaagaagacagcttatggggctctaaatctgctgcccagccaacaagatcagttcttgagcttgtcaggtcaaacccaggaaacgcaagactggacctctgttccactgtccatgcagcattaaccccagaagtgggagtccaaactctgcctaccggagtctttggaccactacctgtaggaacctgtggttttctcttaggacgaagcagttctattgtagaaggcctgcagatttatccaggtgttataagtaatgattatgagggagaaattaaaatcatagccgcttgccctcgtggtgctataactatacccgctaatcagaaaattgctcaacttaccttgatccccttgcgctggtcactatctaaattctctaaaaatgaagaaggacagattaactttgactcctctggcgtaaattgggtgaaatctatcactaatcagagacctaaccttaaattgattcttgatggaaaaagctttgaaggattaatagataccggggccgatgtaaccattattagagggcaggactggccctcaaactggcccctgtctgtttccttgactcaccttcaaggaattggttatgccagtaacccaaaacgtagttccaaattgctaacctggagagatgaggatggaaaatcaggaaatattcagccgtatgttatgcaaaatttgcctgtaaccctgtggggaagagatctgttgtcacagatgggcgttatcctgtgcagttctaaggaaatggtgactgaacagacgttcaggcagggacccctgcctgatcgtggactaataaagaagggacagaaaattaagacttttgaagatcttaaaccccactctaacgtgagaggtttaaagtattttcagtagtggccgctgtcttgcctgcatcccacgccgaaaaaattcaatggcgtaatgatattccggtgtgggtagatcagtggtctttacctaaagagaaaatagaggccgcttctctgctagtgcaggagcagttagaagcaggacatttggtggagtctcattctccctggaatacacccattttcattatcaggaagaaatcgggaaaatggagactgttgcaagatttaagaaaggttaatgaaaccatggtacttatgggaactttacaaccggggctcccctccccagtagccattcctaagggatactataagattgttatagatttgaaagattgtttctttaccatccctttgcatccagaggattgtgagagatttgcttttagtgttccttctgtaaatttcaaggaacccatgaaaagatatcaatggacagttctcccgcaggggatggctaatagtcccaccttatgtcaaaagtttgtggcaaaggcaattcagcctgttagacaacaatggccaaatatttacatcattcatttcacagatgatgttttgatggcgggaaaggacccccaagatttgcttttgtgttatggagacttacgaaaggccctggctgataagggattacaaattgcttctgaaaagatacaaactcaggatccttataattatttgggttttagactcactgaccaagctgtttttcaccagaaaattgttattcgtagagataacttaaggaccttaaatgattttcaaaaattgttaggtgatataaactggcttcgcccctatctaaagcttactacaggggagttgaaacctttatttgatattcttaaagggagttctgatcctacttcccctagatccctaacctcagaaggtttactggccttacagctagtggaaaaggctattgaagaacagtttgtcacttacatagattactccctgccgctgcacctgttaatttttaacacgactcatgtgcctacgggattgctatggcaaaaatttcctataatgtggatacattcaaggatttctcccaaacgtaatattttgccatatcatgaagcagtggctcagatgattatcactggaagaaggcaggcattgacttattttggaaaggagccagatatcattgtccagccttacagcgtgagtcaggacacttggctgaaacagcatagtacagattggttgcttgcacaattagggtttgaaggaactatagatagccactacccccaagataggttgataaaattcttaaatgtacatgatatgatatttcctaagatgacttccttacagcctttaaataatgctctattgatttttactgatggctcctctaaagggcgagctggatatcttattagtaatcaacaggttatcgtagagactcctggtctctcggctcagctcgccgaactaacagcagtactgaaggtttttcagtctgtacaggaggcttttaatatttttactgacagtttatatgttgctcagtcagtacccttattggaaacctgtggtacttttaacttcaatacgccgtcaggatctttattttcagaattacaaaacatcattctcgcccggaaaaatccgttttatattggccacatacggtctcactctggtcttcctggacctctggcagagggtaataattgcattgacagagctctaataggagaagccttagtttcagatcgggttgctttggcccaacgtgatcatgaaaggtttcatctctctagccataccctaaggctccgacataagatcaccaaggagcaagcgagaatgattgtaaaacaatgtcctaaatgtattactttatctccagtgccgcatctaggagttaatcctagaggccttatgcctaatcatatttggcaaatggatataacccattatgcagaatttggaaaactaaaatatatacatgtttgcattgatacttgttcaggatttctctttgcttctctgcatacaggagaagcttcaaaaaacgtaattgatcattgcctacaagcatttaatgccatgggattacctaaacttattaagacagacaatgggccatcttattccagtaaaaactttatttcattctgtaaagaattcggtattaaacataaaactggaattccttacaaccccatgggacaaggaatagttgaacgtgctcatcgcaccttaaagaattggctctttaagacaaaagaggggcagctatatcccccaaggtctccaaaggcccaccttgccttcaccttatttgtcctaaatttcttgcacaccgatatcaagggccagtctgcagcggatcgccactggcatccagttacttctaattcttatgcattggtaaaatggaaggaccccctgactaatgaatggaagggtccagatccagttctaatttggggtagaggctcagtttgtgttttttcacgagatgaagatggagcacggtggctgccagagagattaattcgtcagacgaacacagattctgactcttctggtaagtatcattctaaagactaaaattccttttgtgcttaaaattcagctgagagcaacagctctcaaagctgttctccagctactctctgagccagctcccgacaggaggccggagactagcctcagctttacaatttgcatttaaataaagtacctagacttccccgaaaaaagttctgcttttctactttctcactgtctttcaagattttgtctttcaagcaggtaaatcaacattctcgaggcggaccagcggatgtgcatccccgcccccctagagcactcaggtggcagctgttatccccagtctcaggacattccagcatgtggccttcagtctgagttaaaaattaggtttacccagaggactagaatagtagatatttctatattaataaagattggtttttattttgatagacaggcttagccccttagctgacctctggcttttcacccttgctgttactgcaaggtgtctttagctcaataaggctgtggaaaaaaacagggatgaggaggaacggctcccagctcctattttagccacaaatcgtggtgttactaacgacataattcttgcttaggctttgctaaatctgaggttgataattctcctttaggagctgcacagcgctcagaactgtgcatactgatttgtgatggtacaaattcagtatgggcatcgcttggtgcagatggaggtactgcaaggaaaggtcccagcttgaccatttctgagtttcctgtgagataaacccggtttgaaagaggttggtaccaaattatatatccctcggctctacctcgcctccccaaaaggtaccagagccacaggtgtggattttaacagaatccacgggaggaatcgggtccatgtccacccaagccaaggttaaaagcccactcatctacggatgagaaaatcatttgatcacctcagttaagcgctgccttattttaacttaattaataggggggagagagattggagacttactattgaaagggcaagcccttcactgcctcccacccaaataaaaaagccaattggccttgtactacagagctggccggaccccttatccctgttacccaccaatcatccaaaaatgcggaggaatatcaacttagtgttattcttattatagtgtatttcacacttgttcagtcaaacttagccagagttccaacgccctacttaaaattcaactagaaagttacctaccaagtactaattagcattataaagtcagagcctacagctccaggcttttcagttagttgtttactaagataagaaaagacagtcttagccagatacagtttaccataataaaagttaaagaatcccagggaagcaagttttttcttttagccctagattccaggcagaactattgagcatagataatttttccccctcaggccagctttttctttttttttaattttgttaataaaagggaggagatgtagtctcccctcccccagcctgaaacctgcttgctcaggggtggagcttcccgctcatcgctctgccacgcccactgctggaacctgcggagccacacacgtgcacctttctactggaccagagattattcggcgggaatcgggtcccctcccccttccttcataactagtgtcccaacaataaaatttgagctttgatcagaatgaatttgtcttggctccgtttcttctttcgccccgtctagattcctctcttacagctcgagtggccttctcagtcgaaccgttcacgttgcgagctgctggcggccgcaacaggggatccagacatgataagatacattgatgagtttggacaaaccacaactagaatgcagtgaaaaaaatgctttatttgtgaaatttgtgatgctattgctttatttgtaaccattataagctgcaataaacaagttaacaacaacaattgcattcattttatgtttcaggttcagggggaggtgtgggaggttttttcggatcctctagagtcgacctgcaggcatgcaagcttggcgtaatcatggtcatagctgtttcctgtgtgaaattgttatccgctcacaattccacacaacatacgagccggaagcataaagtgtaaagcctggggtgcctaatgagtgagctaactcacattaattgcgttgcgctcactgcccgctttccagtcgggaaacctgtcgtgccagctgcattaatgaatcggccaacgcgcggggagaggcggtttgcgtattgggcgctcttccgcttcctcgctcactgactcgctgcgctcggtcgttcggctgcggcgagcggtatcagctcactcaaaggcggtaatacggttatccacagaatcaggggataacgcaggaaagaacatgtgagcaaaaggccagcaaaaggccaggaaccgtaaaaaggccgcgttgctggcgtttttccataggctccgcccccctgacgagcatcacaaaaatcgacgctcaagtcagaggtggcgaaacccgacaggactataaagataccaggcgtttccccctggaagctccctcgtgcgctctcctgttccgaccctgccgcttaccggatacctgtccgcctttctcccttcgggaagcgtggcgctttctcatagctcacgctgtaggtatctcagttcggtgtaggtcgttcgctccaagctgggctgtgtgcacgaaccccccgttcagcccgaccgctgcgccttatccggtaactatcgtcttgagtccaacccggtaagacacgacttatcgccactggcagcagccactggtaacaggattagcagagcgaggtatgtaggcggtgctacagagttcttgaagtggtggcctaactacggctacactagaaggacagtatttggtatctgcgctctgctgaagccagttaccttcggaaaaagagttggtagctcttgatccggcaaacaaaccaccgctggtagcggtggtttttttgtttgcaagcagcagattacgcgcagaaaaaaaggatctcaagaagatcctttgatcttttctacggggtctgacgctcagtggaacgaaaactcacgttaagggattttggtcatgagattatcaaaaaggatcttcacctagatccttttaaattaaaaatgaagttttaaatcaatctaaagtatatatgagtaaacttggtctgacagttaccaatgcttaatcagtgaggcacctatctcagcgatctgtctatttcgttcatccatagttgcctgactccccgtcgtgtagataactacgatacgggagggcttaccatctggccccagtgctgcaatgataccgcgagacccacgctcaccggctccagatttatcagcaataaaccagccagccggaagggccgagcgcagaagtggtcctgcaactttatccgcctccatccagtctattaattgttgccgggaagctagagtaagtagttcgccagttaatagtttgcgcaacgttgttgccattgctacaggcatcgtggtgtcacgctcgtcgtttggtatggcttcattcagctccggttcccaacgatcaaggcgagttacatgatcccccatgttgtgcaaaaaagcggttagctccttcggtcctccgatcgttgtcagaagtaagttggccgcagtgttatcactcatggttatggcagcactgcataattctcttactgtcatgccatccgtaagatgcttttctgtgactggtgagtactcaaccaagtcattctgagaatagtgtatgcggcgaccgagttgctcttgcccggcgtcaatacgggataataccgcgccacatagcagaactttaaaagtgctcatcattggaaaacgttcttcggggcgaaaactctcaaggatcttaccgctgttgagatccagttcgatgtaacccactcgtgcacccaactgatcttcagcatcttttactttcaccagcgtttctgggtgagcaaaaacaggaaggcaaaatgccgcaaaaaagggaataagggcgacacggaaatgttgaatactcatactcttcctttttcaatattattgaagcatttatcagggttattgtctcatgagcggatacatatttgaatgtatttagaaaaataaacaaataggggttccgcgcacatttccccgaaaagtgccacctgacgtctaagaaaccattattatcatgacattaacctataaaaataggcgtatcacgaggccctttcgtctcgcgcgtttcggtgatgacggtgaaaacctctgacacatgcagctcccggagacggtcacagcttgtctgtaagcggatgccgggagcagacaagcccgtcagggcgcgtcagcgggtgttggcgggtgtcggggctggcttaactatgcggcatcagagcagattgtactgagagtgcaccatatgcggtgtgaaataccgcacagatgcgtaaggagaaaataccgcatcaggcgccattcgccattcaggctgcgcaactgttgggaagggcgatcggtgcgggcctcttcgctattacgccagctggcgaaagggggatgtgctgcaaggcgattaagttgggtaacgccagggttttcccagtcacgacgttgtaaaacgacggccagt

SEQ ID NO: 321 - DNA, 10715 bp, Artificial Sequence
  Description of Artificial Sequence: Synthetic polynucleotide
gaattcgagcttgcatgcctgcaggtcgttacataacttacggtaaatggcccgcctggctgaccgcccaacgacccccgcccattgacgtcaataatgacgtatgttcccatagtaacgccaatagggactttccattgacgtcaatgggtggagtatttacggtaaactgcccacttggcagtacatcaagtgtatcatatgccaagtacgccccctattgacgtcaatgacggtaaatggcccgcctggcattatgcccagtacatgaccttatgggactttcctacttggcagtacatctacgtattagtcatcgctattaccatggtgatgcggttttggcagtacatcaatgggcgtggatagcggtttgactcacggggatttccaagtctccaccccattgacgtcaatgggagtttgttttggcaccaaaatcaacgggactttccaaaatgtcgtaacaactccgccccattgacgcaaatgggcggtaggcgtgtacggtgggaggtctatataagcagagctcgtttagtgaaccgtcagctttgatcagaatgaatttgtcttggctccgtttcttctttcgccccgtctagattcctctcttacagctcgagtggccttctcagtcgaaccgttcacgttgcgagctgctggcggccgcaacattttagcgactaaacacatcactgaagaatccgagagagatgctaagaggaacgctgctttggagctccacaggaaaggatcttcgtatcggacatcggagcaacggacaggtacacatgctagcgctagcttaaaatttcagttttgtaaagtgttgctgaggatgtggtaggatacgaattaagcttgaatcagtgctaacccaacgctggttctgcttgggtcagcagcgtgttaatcggaactagaaacggaaacaggcaggttagccgcagctttttaggaagctgcttaggtggaagaagaaagggtttaaagtcatggatcaggcggttgcccatagttttcaggagttgtttcaggccagaggagtaaggcttgaagtacaattagtaaaaaattttttaggtaagatagatagctgttgcccatggttcaaggaagaagaaacactagattgtggaacctgggagaaagttggtgaggccttaaaaatcactcaggcagataattttaccctaggcctctgggcactcataaatgatgcaataaaagatgccacttccccagggctaagttgcccccaggcggagcttgtggtatctcaggaggagtgcctgtcagagagggcctcctcagaaaaagatcttcttaactcaaaaattgataaatgtggaaactcggatgaaaaactgatttttaacaaaaatcactcagatagaggagctgcccattaccttaatgagaattggtcctcttgtgaatctcctgctcaacctgtagtccccacttcgggaggtgccactcatagggacacacgactaagcgagttagagtttgagattaagcttcagaggctgactaatgagcttcgggaactaaaaaagatgtcagaagcggagaagagtaactcttctgtagttcaccaggtgccgctagaaaaggttgtgagtcaggctcatgggaaaggacagaatatctctaatacgctagcctttcctgtggttgaggtagttgatcagcaagatactaggggcagacattaccagaccttagatttcaagttgataaaagagttaaaggcggctgttgtgcaatatggcccttcagccccattcactcaagcattactggacacagttgtggagtcacacttaacccctttagattggaagactctttctaaggctaccctgtcaggaggagattttttgctttgggattctgaatggcgagacgccagtaagaaaactgctgcttctaacgctcaggctggtaattcagactgggatagcaacatgcttttaggagagggcccttatgagggacagacaaatcagattgattttcccgttgcagtgtacgcgcaaattgcgacggccgcacgccgtgcttggggaaggttgccagtcaaaggagagattggtggaagtttagctagcattcggcagagttctgatgaaccatatcaggattttgtggacaggctattgatttcagctagtagaatccttggaaatccggacacgggaagtcctttcgttatgcaattggcttatgagaatgctaacgcaatttgccgagctgcgattcaaccgcataagggaacgacagatttggcgggatatgtccgtctttgcgcagacatcgggccttcctgcgagaccttgcagggaacccacgcgcaggcaatgttctctaggaaacgagggaatagtgcatgctttaaatgtggaagtttagatcattttagaattgattgtcctcagaacaagggcgccgaggttagacaaacaggccgtgccccgggaatatgtccccgatgtggaaagggccgccactgggcgaaagattgcaagcataaaacgagggttttgagccgcccggtgccgggaaacgaggaaaggggtcagccccaggccccaagttactcaaagaagacagcttatggggctctaaatctgctgcccagccaacaagatcagttcttgagcttgtcaggtcaaacccaggaaacgcaagactggacctctgttccactgtccatgcagcattaaccccagaagtgggagtccaaactctgcctaccggagtctttggaccactacctgtaggaacctgtggttttctcttaggacgaagcagttctattgtagaaggcctgcagatttatccaggtgttataagtaatgattatgagggagaaattaaaatcatagccgcttgccctcgtggtgctataactatacccgctaatcagaaaattgctcaacttaccttgatccccttgcgctggtcactatctaaattctctaaaaatgaagaaggacagattaactttgactcctctggcgtaaattgggtgaaatctatcactaatcagagacctaaccttaaattgattcttgatggaaaaagctttgaaggattaatagataccggggccgatgtaaccattattagagggcaggactggccctcaaactggcccctgtctgtttccttgactcaccttcaaggaattggttatgccagtaacccaaaacgtagttccaaattgctaacctggagagatgaggatggaaaatcaggaaatattcagccgtatgttatgcaaaatttgcctgtaaccctgtggggaagagatctgttgtcacagatgggcgttatcctgtgcagttctaaggaaatggtgactgaacagacgttcaggcagggacccctgcctgatcgtggactaataaagaagggacagaaaattaagacttttgaagatcttaaaccccactctaacgtgagaggtttaaagtattttcagtagtggccgctgtcttgcctgcatcccacgccgaaaaaattcaatggcgtaatgatattccggtgtgggtagatcagtggtctttacctaaagagaaaatagaggccgcttctctgctagtgcaggagcagttagaagcaggacatttggtggagtctcattctccctggaatacacccattttcattatcaggaagaaatcgggaaaatggagactgttgcaagatttaagaaaggttaatgaaaccatggtacttatgggaactttacaaccggggctcccctccccagtagccattcctaagggatactataagattgttatagatttgaaagattgtttctttaccatccctttgcatccagaggattgtgagagatttgcttttagtgttccttctgtaaatttcaaggaacccatgaaaagatatcaatggacagttctcccgcaggggatggctaatagtcccaccttatgtcaaaagtttgtggcaaaggcaattcagcctgttagacaacaatggccaaatatttacatcattcatttcacagatgatgttttgatggcgggaaaggacccccaagatttgcttttgtgttatggagacttacgaaaggccctggctgataagggattacaaattgcttctgaaaagatacaaactcaggatccttataattatttgggttttagactcactgaccaagctgtttttcaccagaaaattgttattcgtagagataacttaaggaccttaaatgattttcaaaaattgttaggtgatataaactggcttcgcccctatctaaagcttactacaggggagttgaaacctttatttgatattcttaaagggagttctgatcctacttcccctagatccctaacctcagaaggtttactggccttacagctagtggaaaaggctattgaagaacagtttgtcacttacatagattactccctgccgctgcacctgttaatttttaacacgactcatgtgcctacgggattgctatggcaaaaatttcctataatgtggatacattcaaggatttctcccaaacgtaatattttgccatatcatgaagcagtggctcagatgattatcactggaagaaggcaggcattgacttattttggaaaggagccagatatcattgtccagccttacagcgtgagtcaggacacttggctgaaacagcatagtacagattggttgcttgcacaattagggtttgaaggaactatagatagccactacccccaagataggttgataaaattcttaaatgtacatgatatgatatttcctaagatgacttccttacagcctttaaataatgctctattgatttttactgatggctcctctaaagggcgagctggatatcttattagtaatcaacaggttatcgtagagactcctggtctctcggctcagctcgccgaactaacagcagtactgaaggtttttcagtctgtacaggaggcttttaatatttttactgacagtttatatgttgctcagtcagtacccttattggaaacctgtggtacttttaacttcaatacgccgtcaggatctttattttcagaattacaaaacatcattctcgcccggaaaaatccgttttatattggccacatacggtctcactctggtcttcctggacctctggcagagggtaataattgcattgacagagctctaataggagaagccttagtttcagatcgggttgctttggcccaacgtgatcatgaaaggtttcatctctctagccataccctaaggctccgacataagatcaccaaggagcaagcgagaatgattgtaaaacaatgtcctaaatgtattactttatctccagtgccgcatctaggagttaatcctagaggccttatgcctaatcatatttggcaaatggatataacccattatgcagaatttggaaaactaaaatatatacatgtttgcattgatacttgttcaggatttctctttgcttctctgcatacaggagaagcttcaaaaaacgtaattgatcattgcctacaagcatttaatgccatgggattacctaaacttattaagacagacaatgggccatcttattccagtaaaaactttatttcattctgtaaagaattcggtattaaacataaaactggaattccttacaaccccatgggacaaggaatagttgaacgtgctcatcgcaccttaaagaattggctctttaagacaaaagaggggcagctatatcccccaaggtctccaaaggcccaccttgccttcaccttatttgtcctaaatttcttgcacaccgatatcaagggccagtctgcagcggatcgccactggcatccagttacttctaattcttatgcattggtaaaatggaaggaccccctgactaatgaatggaagggtccagatccagttctaatttggggtagaggctcagtttgtgttttttcacgagatgaagatggagcacggtggctgccagagagattaattcgtcagacgaacacagattctgactcttctggtaagtatcattctaaagactaaaattccttttgtgcttaaaattcagctgagagcaacagctctcaaagctgttctccagctactctctgagccagctcccgacaggaggccggagactagcctcagctttacaatttgcatttaaataaagtacctagacttccccgaaaaaagttctgcttttctactttctcactgtctttcaagattttgtctttcaagcaggtaaatcaacattctcgaggcggaccagcggatgtgcatccccgcccccctagagcactcaggtggcagctgttatccccagtctcaggacattccagcatgtggccttcagtctgagttaaaaattaggtttacccagaggactagaatagtagatatttctatattaataaagattggtttttattttgatagacaggcttagccccttagctgacctctggcttttcacccttgctgttactgcaaggtgtctttagctcaataaggctgtggaaaaaaacagggatgaggaggaacggctcccagctcctattttagccacaaatcgtggtgttactaacgacataattcttgcttaggctttgctaaatctgaggttgataattctcctttaggagctgcacagcgctcagaactgtgcatactgatttgtgatggtacaaattcagtatgggcatcgcttggtgcagatggaggtactgcaaggaaaggtcccagcttgaccatttctgagtttcctgtgagataaacccggtttgaaagaggttggtaccaaattatatatccctcggctctacctcgcctccccaaaaggtaccagagccacaggtgtggattttaacagaatccacgggaggaatcgggtccatgtccacccaagccaaggttaaaagcccactcatctacggatgagaaaatcatttgatcacctcagttaagcgctgccttattttaacttaattaataggggggagagagattggagacttactattgaaagggcaagcccttcactgcctcccacccaaataaaaaagccaattggccttgtactacagagctggccggaccccttatccctgttacccaccaatcatccaaaaatgcggaggaatatcaacttagtgttattcttattatagtgtatttcacacttgttcagtcaaacttagccagagttccaacgccctacttaaaattcaactagaaagttacctaccaagtactaattagcattataaagtcagagcctacagctccaggcttttcagttagttgtttactaagataagaaaagacagtcttagccagatacagtttaccataataaaagttaaagaatcccagggaagcaagttttttcttttagccctagattccaggcagaactattgagcatagataatttttccccctcaggccagctttttctttttttttaattttgttaataaaagggaggagatgtagtctcccctcccccagcctgaaacctgcttgctcaggggtggagcttcccgctcatcgctctgccacgcccactgctggaacctgcggagccacacacgtgcacctttctactggaccagagattattcggcgggaatcgggtcccctcccccttccttcataactagtgtcccaacaataaaatttgagctttgatcagaatgaatttgtcttggctccgtttcttctttcgccccgtctagattcctctcttacagctcgagtggccttctcagtcgaaccgttcacgttgcgagctgctggcggccgcaacaggggatccagacatgataagatacattgatgagtttggacaaaccacaactagaatgcagtgaaaaaaatgctttatttgtgaaatttgtgatgctattgctttatttgtaaccattataagctgcaataaacaagttaacaacaacaattgcattcattttatgtttcaggttcagggggaggtgtgggaggttttttcggatcctctagagtcgacctgcaggcatgcaagcttggcgtaatcatggtcatagctgtttcctgtgtgaaattgttatccgctcacaattccacacaacatacgagccggaagcataaagtgtaaagcctggggtgcctaatgagtgagctaactcacattaattgcgttgcgctcactgcccgctttccagtcgggaaacctgtcgtgccagctgcattaatgaatcggccaacgcgcggggagaggcggtttgcgtattgggcgctcttccgcttcctcgctcactgactcgctgcgctcggtcgttcggctgcggcgagcggtatcagctcactcaaaggcggtaatacggttatccacagaatcaggggataacgcaggaaagaacatgtgagcaaaaggccagcaaaaggccaggaaccgtaaaaaggccgcgttgctggcgtttttccataggctccgcccccctgacgagcatcacaaaaatcgacgctcaagtcagaggtggcgaaacccgacaggactataaagataccaggcgtttccccctggaagctccctcgtgcgctctcctgttccgaccctgccgcttaccggatacctgtccgcctttctcccttcgggaagcgtggcgctttctcatagctcacgctgtaggtatctcagttcggtgtaggtcgttcgctccaagctgggctgtgtgcacgaaccccccgttcagcccgaccgctgcgccttatccggtaactatcgtcttgagtccaacccggtaagacacgacttatcgccactggcagcagccactggtaacaggattagcagagcgaggtatgtaggcggtgctacagagttcttgaagtggtggcctaactacggctacactagaaggacagtatttggtatctgcgctctgctgaagccagttaccttcggaaaaagagttggtagctcttgatccggcaaacaaaccaccgctggtagcggtggtttttttgtttgcaagcagcagattacgcgcagaaaaaaaggatctcaagaagatcctttgatcttttctacggggtctgacgctcagtggaacgaaaactcacgttaagggattttggtcatgagattatcaaaaaggatcttcacctagatccttttaaattaaaaatgaagttttaaatcaatctaaagtatatatgagtaaacttggtctgacagttaccaatgcttaatcagtgaggcacctatctcagcgatctgtctatttcgttcatccatagttgcctgactccccgtcgtgtagataactacgatacgggagggcttaccatctggccccagtgctgcaatgataccgcgagacccacgctcaccggctccagatttatcagcaataaaccagccagccggaagggccgagcgcagaagtggtcctgcaactttatccgcctccatccagtctattaattgttgccgggaagctagagtaagtagttcgccagttaatagtttgcgcaacgttgttgccattgctacaggcatcgtggtgtcacgctcgtcgtttggtatggcttcattcagctccggttcccaacgatcaaggcgagttacatgatcccccatgttgtgcaaaaaagcggttagctccttcggtcctccgatcgttgtcagaagtaagttggccgcagtgttatcactcatggttatggcagcactgcataattctcttactgtcatgccatccgtaagatgcttttctgtgactggtgagtactcaaccaagtcattctgagaatagtgtatgcggcgaccgagttgctcttgcccggcgtcaatacgggataataccgcgccacatagcagaactttaaaagtgctcatcattggaaaacgttcttcggggcgaaaactctcaaggatcttaccgctgttgagatccagttcgatgtaacccactcgtgcacccaactgatcttcagcatcttttactttcaccagcgtttctgggtgagcaaaaacaggaaggcaaaatgccgcaaaaaagggaataagggcgacacggaaatgttgaatactcatactcttcctttttcaatattattgaagcatttatcagggttattgtctcatgagcggatacatatttgaatgtatttagaaaaataaacaaataggggttccgcgcacatttccccgaaaagtgccacctgacgtctaagaaaccattattatcatgacattaacctataaaaataggcgtatcacgaggccctttcgtctcgcgcgtttcggtgatgacggtgaaaacctctgacacatgcagctcccggagacggtcacagcttgtctgtaagcggatgccgggagcagacaagcccgtcagggcgcgtcagcgggtgttggcgggtgtcggggctggcttaactatgcggcatcagagcagattgtactgagagtgcaccatatgcggtgtgaaataccgcacagatgcgtaaggagaaaataccgcatcaggcgccattcgccattcaggctgcgcaactgttgggaagggcgatcggtgcgggcctcttcgctattacgccagctggcgaaagggggatgtgctgcaaggcgattaagttgggtaacgccagggttttcccagtcacgacgttgtaaaacgacggccagt

SEQ ID NO: 322 - DNA, 10700 bp, Artificial Sequence
  Description of Artificial Sequence: Synthetic polynucleotide
gaattcgagcttgcatgcctgcaggtcgttacataacttacggtaaatggcccgcctggctgaccgcccaacgacccccgcccattgacgtcaataatgacgtatgttcccatagtaacgccaatagggactttccattgacgtcaatgggtggagtatttacggtaaactgcccacttggcagtacatcaagtgtatcatatgccaagtacgccccctattgacgtcaatgacggtaaatggcccgcctggcattatgcccagtacatgaccttatgggactttcctacttggcagtacatctacgtattagtcatcgctattaccatggtgatgcggttttggcagtacatcaatgggcgtggatagcggtttgactcacggggatttccaagtctccaccccattgacgtcaatgggagtttgttttggcaccaaaatcaacgggactttccaaaatgtcgtaacaactccgccccattgacgcaaatgggcggtaggcgtgtacggtgggaggtctatataagcagagctgagctttgatcagaatgaatttgtcttggctccgtttcttctttcgccccgtctagattcctctcttacagctcgagtggccttctcagtcgaaccgttcacgttgcgagctgctggcggccgcaacattttagcgactaaacacatcactgaagaatccgagagagatgctaagaggaacgctgctttggagctccacaggaaaggatcttcgtatcggacatcggagcaacggacaggtacacatgctagcgctagcttaaaatttcagttttgtaaagtgttgctgaggatgtggtaggatacgaattaagcttgaatcagtgctaacccaacgctggttctgcttgggtcagcagcgtgttaatcggaactagaaacggaaacaggcaggttagccgcagctttttaggaagctgcttaggtggaagaagaaagggtttaaagtcatggatcaggcggttgcccatagttttcaggagttgtttcaggccagaggagtaaggcttgaagtacaattagtaaaaaattttttaggtaagatagatagctgttgcccatggttcaaggaagaagaaacactagattgtggaacctgggagaaagttggtgaggccttaaaaatcactcaggcagataattttaccctaggcctctgggcactcataaatgatgcaataaaagatgccacttccccagggctaagttgcccccaggcggagcttgtggtatctcaggaggagtgcctgtcagagagggcctcctcagaaaaagatcttcttaactcaaaaattgataaatgtggaaactcggatgaaaaactgatttttaacaaaaatcactcagatagaggagctgcccattaccttaatgagaattggtcctcttgtgaatctcctgctcaacctgtagtccccacttcgggaggtgccactcatagggacacacgactaagcgagttagagtttgagattaagcttcagaggctgactaatgagcttcgggaactaaaaaagatgtcagaagcggagaagagtaactcttctgtagttcaccaggtgccgctagaaaaggttgtgagtcaggctcatgggaaaggacagaatatctctaatacgctagcctttcctgtggttgaggtagttgatcagcaagatactaggggcagacattaccagaccttagatttcaagttgataaaagagttaaaggcggctgttgtgcaatatggcccttcagccccattcactcaagcattactggacacagttgtggagtcacacttaacccctttagattggaagactctttctaaggctaccctgtcaggaggagattttttgctttgggattctgaatggcgagacgccagtaagaaaactgctgcttctaacgctcaggctggtaattcagactgggatagcaacatgcttttaggagagggcccttatgagggacagacaaatcagattgattttcccgttgcagtgtacgcgcaaattgcgacggccgcacgccgtgcttggggaaggttgccagtcaaaggagagattggtggaagtttagctagcattcggcagagttctgatgaaccatatcaggattttgtggacaggctattgatttcagctagtagaatccttggaaatccggacacgggaagtcctttcgttatgcaattggcttatgagaatgctaacgcaatttgccgagctgcgattcaaccgcataagggaacgacagatttggcgggatatgtccgtctttgcgcagacatcgggccttcctgcgagaccttgcagggaacccacgcgcaggcaatgttctctaggaaacgagggaatagtgcatgctttaaatgtggaagtttagatcattttagaattgattgtcctcagaacaagggcgccgaggttagacaaacaggccgtgccccgggaatatgtccccgatgtggaaagggccgccactgggcgaaagattgcaagcataaaacgagggttttgagccgcccggtgccgggaaacgaggaaaggggtcagccccaggccccaagttactcaaagaagacagcttatggggctctaaatctgctgcccagccaacaagatcagttcttgagcttgtcaggtcaaacccaggaaacgcaagactggacctctgttccactgtccatgcagcattaaccccagaagtgggagtccaaactctgcctaccggagtctttggaccactacctgtaggaacctgtggttttctcttaggacgaagcagttctattgtagaaggcctgcagatttatccaggtgttataagtaatgattatgagggagaaattaaaatcatagccgcttgccctcgtggtgctataactatacccgctaatcagaaaattgctcaacttaccttgatccccttgcgctggtcactatctaaattctctaaaaatgaagaaggacagattaactttgactcctctggcgtaaattgggtgaaatctatcactaatcagagacctaaccttaaattgattcttgatggaaaaagctttgaaggattaatagataccggggccgatgtaaccattattagagggcaggactggccctcaaactggcccctgtctgtttccttgactcaccttcaaggaattggttatgccagtaacccaaaacgtagttccaaattgctaacctggagagatgaggatggaaaatcaggaaatattcagccgtatgttatgcaaaatttgcctgtaaccctgtggggaagagatctgttgtcacagatgggcgttatcctgtgcagttctaaggaaatggtgactgaacagacgttcaggcagggacccctgcctgatcgtggactaataaagaagggacagaaaattaagacttttgaagatcttaaaccccactctaacgtgagaggtttaaagtattttcagtagtggccgctgtcttgcctgcatcccacgccgaaaaaattcaatggcgtaatgatattccggtgtgggtagatcagtggtctttacctaaagagaaaatagaggccgcttctctgctagtgcaggagcagttagaagcaggacatttggtggagtctcattctccctggaatacacccattttcattatcaggaagaaatcgggaaaatggagactgttgcaagatttaagaaaggttaatgaaaccatggtacttatgggaactttacaaccggggctcccctccccagtagccattcctaagggatactataagattgttatagatttgaaagattgtttctttaccatccctttgcatccagaggattgtgagagatttgcttttagtgttccttctgtaaatttcaaggaacccatgaaaagatatcaatggacagttctcccgcaggggatggctaatagtcccaccttatgtcaaaagtttgtggcaaaggcaattcagcctgttagacaacaatggccaaatatttacatcattcatttcacagatgatgttttgatggcgggaaaggacccccaagatttgcttttgtgttatggagacttacgaaaggccctggctgataagggattacaaattgcttctgaaaagatacaaactcaggatccttataattatttgggttttagactcactgaccaagctgtttttcaccagaaaattgttattcgtagagataacttaaggaccttaaatgattttcaaaaattgttaggtgatataaactggcttcgcccctatctaaagcttactacaggggagttgaaacctttatttgatattcttaaagggagttctgatcctacttcccctagatccctaacctcagaaggtttactggccttacagctagtggaaaaggctattgaagaacagtttgtcacttacatagattactccctgccgctgcacctgttaatttttaacacgactcatgtgcctacgggattgctatggcaaaaatttcctataatgtggatacattcaaggatttctcccaaacgtaatattttgccatatcatgaagcagtggctcagatgattatcactggaagaaggcaggcattgacttattttggaaaggagccagatatcattgtccagccttacagcgtgagtcaggacacttggctgaaacagcatagtacagattggttgcttgcacaattagggtttgaaggaactatagatagccactacccccaagataggttgataaaattcttaaatgtacatgatatgatatttcctaagatgacttccttacagcctttaaataatgctctattgatttttactgatggctcctctaaagggcgagctggatatcttattagtaatcaacaggttatcgtagagactcctggtctctcggctcagctcgccgaactaacagcagtactgaaggtttttcagtctgtacaggaggcttttaatatttttactgacagtttatatgttgctcagtcagtacccttattggaaacctgtggtacttttaacttcaatacgccgtcaggatctttattttcagaattacaaaacatcattctcgcccggaaaaatccgttttatattggccacatacggtctcactctggtcttcctggacctctggcagagggtaataattgcattgacagagctctaataggagaagccttagtttcagatcgggttgctttggcccaacgtgatcatgaaaggtttcatctctctagccataccctaaggctccgacataagatcaccaaggagcaagcgagaatgattgtaaaacaatgtcctaaatgtattactttatctccagtgccgcatctaggagttaatcctagaggccttatgcctaatcatatttggcaaatggatataacccattatgcagaatttggaaaactaaaatatatacatgtttgcattgatacttgttcaggatttctctttgcttctctgcatacaggagaagcttcaaaaaacgtaattgatcattgcctacaagcatttaatgccatgggattacctaaacttattaagacagacaatgggccatcttattccagtaaaaactttatttcattctgtaaagaattcggtattaaacataaaactggaattccttacaaccccatgggacaaggaatagttgaacgtgctcatcgcaccttaaagaattggctctttaagacaaaagaggggcagctatatcccccaaggtctccaaaggcccaccttgccttcaccttatttgtcctaaatttcttgcacaccgatatcaagggccagtctgcagcggatcgccactggcatccagttacttctaattcttatgcattggtaaaatggaaggaccccctgactaatgaatggaagggtccagatccagttctaatttggggtagaggctcagtttgtgttttttcacgagatgaagatggagcacggtggctgccagagagattaattcgtcagacgaacacagattctgactcttctggtaagtatcattctaaagactaaaattccttttgtgcttaaaattcagctgagagcaacagctctcaaagctgttctccagctactctctgagccagctcccgacaggaggccggagactagcctcagctttacaatttgcatttaaataaagtacctagacttccccgaaaaaagttctgcttttctactttctcactgtctttcaagattttgtctttcaagcaggtaaatcaacattctcgaggcggaccagcggatgtgcatccccgcccccctagagcactcaggtggcagctgttatccccagtctcaggacattccagcatgtggccttcagtctgagttaaaaattaggtttacccagaggactagaatagtagatatttctatattaataaagattggtttttattttgatagacaggcttagccccttagctgacctctggcttttcacccttgctgttactgcaaggtgtctttagctcaataaggctgtggaaaaaaacagggatgaggaggaacggctcccagctcctattttagccacaaatcgtggtgttactaacgacataattcttgcttaggctttgctaaatctgaggttgataattctcctttaggagctgcacagcgctcagaactgtgcatactgatttgtgatggtacaaattcagtatgggcatcgcttggtgcagatggaggtactgcaaggaaaggtcccagcttgaccatttctgagtttcctgtgagataaacccggtttgaaagaggttggtaccaaattatatatccctcggctctacctcgcctccccaaaaggtaccagagccacaggtgtggattttaacagaatccacgggaggaatcgggtccatgtccacccaagccaaggttaaaagcccactcatctacggatgagaaaatcatttgatcacctcagttaagcgctgccttattttaacttaattaataggggggagagagattggagacttactattgaaagggcaagcccttcactgcctcccacccaaataaaaaagccaattggccttgtactacagagctggccggaccccttatccctgttacccaccaatcatccaaaaatgcggaggaatatcaacttagtgttattcttattatagtgtatttcacacttgttcagtcaaacttagccagagttccaacgccctacttaaaattcaactagaaagttacctaccaagtactaattagcattataaagtcagagcctacagctccaggcttttcagttagttgtttactaagataagaaaagacagtcttagccagatacagtttaccataataaaagttaaagaatcccagggaagcaagttttttcttttagccctagattccaggcagaactattgagcatagataatttttccccctcaggccagctttttctttttttttaattttgttaataaaagggaggagatgtagtctcccctcccccagcctgaaacctgcttgctcaggggtggagcttcccgctcatcgctctgccacgcccactgctggaacctgcggagccacacacgtgcacctttctactggaccagagattattcggcgggaatcgggtcccctcccccttccttcataactagtgtcccaacaataaaatttgagctttgatcagaatgaatttgtcttggctccgtttcttctttcgccccgtctagattcctctcttacagctcgagtggccttctcagtcgaaccgttcacgttgcgagctgctggcggccgcaacaggggatccagacatgataagatacattgatgagtttggacaaaccacaactagaatgcagtgaaaaaaatgctttatttgtgaaatttgtgatgctattgctttatttgtaaccattataagctgcaataaacaagttaacaacaacaattgcattcattttatgtttcaggttcagggggaggtgtgggaggttttttcggatcctctagagtcgacctgcaggcatgcaagcttggcgtaatcatggtcatagctgtttcctgtgtgaaattgttatccgctcacaattccacacaacatacgagccggaagcataaagtgtaaagcctggggtgcctaatgagtgagctaactcacattaattgcgttgcgctcactgcccgctttccagtcgggaaacctgtcgtgccagctgcattaatgaatcggccaacgcgcggggagaggcggtttgcgtattgggcgctcttccgcttcctcgctcactgactcgctgcgctcggtcgttcggctgcggcgagcggtatcagctcactcaaaggcggtaatacggttatccacagaatcaggggataacgcaggaaagaacatgtgagcaaaaggccagcaaaaggccaggaaccgtaaaaaggccgcgttgctggcgtttttccataggctccgcccccctgacgagcatcacaaaaatcgacgctcaagtcagaggtggcgaaacccgacaggactataaagataccaggcgtttccccctggaagctccctcgtgcgctctcctgttccgaccctgccgcttaccggatacctgtccgcctttctcccttcgggaagcgtggcgctttctcatagctcacgctgtaggtatctcagttcggtgtaggtcgttcgctccaagctgggctgtgtgcacgaaccccccgttcagcccgaccgctgcgccttatccggtaactatcgtcttgagtccaacccggtaagacacgacttatcgccactggcagcagccactggtaacaggattagcagagcgaggtatgtaggcggtgctacagagttcttgaagtggtggcctaactacggctacactagaaggacagtatttggtatctgcgctctgctgaagccagttaccttcggaaaaagagttggtagctcttgatccggcaaacaaaccaccgctggtagcggtggtttttttgtttgcaagcagcagattacgcgcagaaaaaaaggatctcaagaagatcctttgatcttttctacggggtctgacgctcagtggaacgaaaactcacgttaagggattttggtcatgagattatcaaaaaggatcttcacctagatccttttaaattaaaaatgaagttttaaatcaatctaaagtatatatgagtaaacttggtctgacagttaccaatgcttaatcagtgaggcacctatctcagcgatctgtctatttcgttcatccatagttgcctgactccccgtcgtgtagataactacgatacgggagggcttaccatctggccccagtgctgcaatgataccgcgagacccacgctcaccggctccagatttatcagcaataaaccagccagccggaagggccgagcgcagaagtggtcctgcaactttatccgcctccatccagtctattaattgttgccgggaagctagagtaagtagttcgccagttaatagtttgcgcaacgttgttgccattgctacaggcatcgtggtgtcacgctcgtcgtttggtatggcttcattcagctccggttcccaacgatcaaggcgagttacatgatcccccatgttgtgcaaaaaagcggttagctccttcggtcctccgatcgttgtcagaagtaagttggccgcagtgttatcactcatggttatggcagcactgcataattctcttactgtcatgccatccgtaagatgcttttctgtgactggtgagtactcaaccaagtcattctgagaatagtgtatgcggcgaccgagttgctcttgcccggcgtcaatacgggataataccgcgccacatagcagaactttaaaagtgctcatcattggaaaacgttcttcggggcgaaaactctcaaggatcttaccgctgttgagatccagttcgatgtaacccactcgtgcacccaactgatcttcagcatcttttactttcaccagcgtttctgggtgagcaaaaacaggaaggcaaaatgccgcaaaaaagggaataagggcgacacggaaatgttgaatactcatactcttcctttttcaatattattgaagcatttatcagggttattgtctcatgagcggatacatatttgaatgtatttagaaaaataaacaaataggggttccgcgcacatttccccgaaaagtgccacctgacgtctaagaaaccattattatcatgacattaacctataaaaataggcgtatcacgaggccctttcgtctcgcgcgtttcggtgatgacggtgaaaacctctgacacatgcagctcccggagacggtcacagcttgtctgtaagcggatgccgggagcagacaagcccgtcagggcgcgtcagcgggtgttggcgggtgtcggggctggcttaactatgcggcatcagagcagattgtactgagagtgcaccatatgcggtgtgaaataccgcacagatgcgtaaggagaaaataccgcatcaggcgccattcgccattcaggctgcgcaactgttgggaagggcgatcggtgcgggcctcttcgctattacgccagctggcgaaagggggatgtgctgcaaggcgattaagttgggtaacgccagggttttcccagtcacgacgttgtaaaacgacggccagt

SEQ ID NO: 323 - DNA, 5114 bp, Artificial Sequence
  Description of Artificial Sequence: Synthetic polynucleotide
gaattcgagcttgcatgcctgcaggtcgttacataacttacggtaaatggcccgcctggctgaccgcccaacgacccccgcccattgacgtcaataatgacgtatgttcccatagtaacgccaatagggactttccattgacgtcaatgggtggagtatttacggtaaactgcccacttggcagtacatcaagtgtatcatatgccaagtacgccccctattgacgtcaatgacggtaaatggcccgcctggcattatgcccagtacatgaccttatgggactttcctacttggcagtacatctacgtattagtcatcgctattaccatggtgatgcggttttggcagtacatcaatgggcgtggatagcggtttgactcacggggatttccaagtctccaccccattgacgtcaatgggagtttgttttggcaccaaaatcaacgggactttccaaaatgtcgtaacaactccgccccattgacgcaaatgggcggtaggcgtgtacggtgggaggtctatataagcagagctcgtttagtgaaccgtcagagctttgatcagaatgaatttgtcttggctccgtttcttctttcgccccgtctagattcctctcttacagctcgagtggccttctcagtcgaaccgttcacgttgcgagctgctggcggccgcaacattttggcgccagaactgggacctgaagaatggcgaacaaacgacccaacacccgtgcgttttattctgtctttttattgccgatcccccggccgctttacttgtacagctcgtccatgccgagagtgatcccggcggcggtcacgaactccagcaggaccatgtgatcgcgcttctcgttggggtctttgctcagggcggactgggtgctcaggtaagtatcaaggttacaagacaggtttaaggagaccaatagaaactgggcttgtcgagacagagaagactcttgcgtttctgataggcacctattggtcttactgacatccactttgcctttctctccacaggtagtggttgtcgggcagcagcacggggccgtcgccgatgggggtgttctgctggtagtggtcggcgagctgcacgctgccgtcctcgatgttgtggcggatcttgaagttcaccttgatgccgttcttctgcttgtcggccatgatatagacgttgtggctgttgtagttgtactccagcttgtgccccaggatgttgccgtcctccttgaagtcgatgcccttcagctcgatgcggttcaccagggtgtcgccctcgaacttcacctcggcgcgggtcttgtagttgccgtcgtccttgaagaagatggtgcgctcctggacgtagccttcgggcatggcggacttgaagaagtcgtgctgcttcatgtggtcggggtagcggctgaagcactgcacgccgtaggtcagggtggtcacgagggtgggccagggcacgggcagcttgccggtggtgcagatgaacttcagggtcagcttgccgtaggtggcatcgccctcgccctcgccggacacgctgaacttgtggccgtttacgtcgccgtccagctcgaccaggatgggcaccaccccggtgaacagctcctcgcccttgctcaccatggtggctttaccaacagtaccggaatgccaagcttgggtcctgtgttctggcggcaaacccgttgcgaaaaagaacgttcacggcgactactgcacttatatacggttctcccccaccctcgggaaaaaggcggagccagtacacgacatcactttcccagtttaccccgcgccaccttctctaggcaccggatcaattgccgacccctccccccaacttctcggggactgtgggcgatgtgcgctctgccctcaggccagctttttctttttttttaattttgttaataaaagggaggagatgtagtctcccctcccccagcctgaaacctgcttgctcaggggtggagcttcccgctcatcgctctgccacgcccactgctggaacctgcggagccacacacgtgcacctttctactggaccagagattattcggcgggaatcgggtcccctcccccttccttcataactagtgtcccaacaataaaatttgagctttgatcagaatgaatttgtcttggctccgtttcttctttcgccccgtctagattcctctcttacagctcgagtggccttctcagtcgaaccgttcacgttgcgagctgctggcggccgcaacaggggatccagacatgataagatacattgatgagtttggacaaaccacaactagaatgcagtgaaaaaaatgctttatttgtgaaatttgtgatgctattgctttatttgtaaccattataagctgcaataaacaagttaacaacaacaattgcattcattttatgtttcaggttcagggggaggtgtgggaggttttttcggatcctctagagtcgacctgcaggcatgcaagcttggcgtaatcatggtcatagctgtttcctgtgtgaaattgttatccgctcacaattccacacaacatacgagccggaagcataaagtgtaaagcctggggtgcctaatgagtgagctaactcacattaattgcgttgcgctcactgcccgctttccagtcgggaaacctgtcgtgccagctgcattaatgaatcggccaacgcgcggggagaggcggtttgcgtattgggcgctcttccgcttcctcgctcactgactcgctgcgctcggtcgttcggctgcggcgagcggtatcagctcactcaaaggcggtaatacggttatccacagaatcaggggataacgcaggaaagaacatgtgagcaaaaggccagcaaaaggccaggaaccgtaaaaaggccgcgttgctggcgtttttccataggctccgcccccctgacgagcatcacaaaaatcgacgctcaagtcagaggtggcgaaacccgacaggactataaagataccaggcgtttccccctggaagctccctcgtgcgctctcctgttccgaccctgccgcttaccggatacctgtccgcctttctcccttcgggaagcgtggcgctttctcatagctcacgctgtaggtatctcagttcggtgtaggtcgttcgctccaagctgggctgtgtgcacgaaccccccgttcagcccgaccgctgcgccttatccggtaactatcgtcttgagtccaacccggtaagacacgacttatcgccactggcagcagccactggtaacaggattagcagagcgaggtatgtaggcggtgctacagagttcttgaagtggtggcctaactacggctacactagaaggacagtatttggtatctgcgctctgctgaagccagttaccttcggaaaaagagttggtagctcttgatccggcaaacaaaccaccgctggtagcggtggtttttttgtttgcaagcagcagattacgcgcagaaaaaaaggatctcaagaagatcctttgatcttttctacggggtctgacgctcagtggaacgaaaactcacgttaagggattttggtcatgagattatcaaaaaggatcttcacctagatccttttaaattaaaaatgaagttttaaatcaatctaaagtatatatgagtaaacttggtctgacagttaccaatgcttaatcagtgaggcacctatctcagcgatctgtctatttcgttcatccatagttgcctgactccccgtcgtgtagataactacgatacgggagggcttaccatctggccccagtgctgcaatgataccgcgagacccacgctcaccggctccagatttatcagcaataaaccagccagccggaagggccgagcgcagaagtggtcctgcaactttatccgcctccatccagtctattaattgttgccgggaagctagagtaagtagttcgccagttaatagtttgcgcaacgttgttgccattgctacaggcatcgtggtgtcacgctcgtcgtttggtatggcttcattcagctccggttcccaacgatcaaggcgagttacatgatcccccatgttgtgcaaaaaagcggttagctccttcggtcctccgatcgttgtcagaagtaagttggccgcagtgttatcactcatggttatggcagcactgcataattctcttactgtcatgccatccgtaagatgcttttctgtgactggtgagtactcaaccaagtcattctgagaatagtgtatgcggcgaccgagttgctcttgcccggcgtcaatacgggataataccgcgccacatagcagaactttaaaagtgctcatcattggaaaacgttcttcggggcgaaaactctcaaggatcttaccgctgttgagatccagttcgatgtaacccactcgtgcacccaactgatcttcagcatcttttactttcaccagcgtttctgggtgagcaaaaacaggaaggcaaaatgccgcaaaaaagggaataagggcgacacggaaatgttgaatactcatactcttcctttttcaatattattgaagcatttatcagggttattgtctcatgagcggatacatatttgaatgtatttagaaaaataaacaaataggggttccgcgcacatttccccgaaaagtgccacctgacgtctaagaaaccattattatcatgacattaacctataaaaataggcgtatcacgaggccctttcgtctcgcgcgtttcggtgatgacggtgaaaacctctgacacatgcagctcccggagacggtcacagcttgtctgtaagcggatgccgggagcagacaagcccgtcagggcgcgtcagcgggtgttggcgggtgtcggggctggcttaactatgcggcatcagagcagattgtactgagagtgcaccatatgcggtgtgaaataccgcacagatgcgtaaggagaaaataccgcatcaggcgccattcgccattcaggctgcgcaactgttgggaagggcgatcggtgcgggcctcttcgctattacgccagctggcgaaagggggatgtgctgcaaggcgattaagttgggtaacgccagggttttcccagtcacgacgttgtaaaacgacggccagt

SEQ ID NO: 324 - DNA, 5112 bp, Artificial Sequence
  Description of Artificial Sequence: Synthetic polynucleotide
gaattcgagcttgcatgcctgcaggtcgttacataacttacggtaaatggcccgcctggctgaccgcccaacgacccccgcccattgacgtcaataatgacgtatgttcccatagtaacgccaatagggactttccattgacgtcaatgggtggagtatttacggtaaactgcccacttggcagtacatcaagtgtatcatatgccaagtacgccccctattgacgtcaatgacggtaaatggcccgcctggcattatgcccagtacatgaccttatgggactttcctacttggcagtacatctacgtattagtcatcgctattaccatggtgatgcggttttggcagtacatcaatgggcgtggatagcggtttgactcacggggatttccaagtctccaccccattgacgtcaatgggagtttgttttggcaccaaaatcaacgggactttccaaaatgtcgtaacaactccgccccattgacgcaaatgggcggtaggcgtgtacggtgggaggtctatataagcagagctcgtttagtgaaccgtcagctttgatcagaatgaatttgtcttggctccgtttcttctttcgccccgtctagattcctctcttacagctcgagtggccttctcagtcgaaccgttcacgttgcgagctgctggcggccgcaacattttggcgccagaactgggacctgaagaatggcgaacaaacgacccaacacccgtgcgttttattctgtctttttattgccgatcccccggccgctttacttgtacagctcgtccatgccgagagtgatcccggcggcggtcacgaactccagcaggaccatgtgatcgcgcttctcgttggggtctttgctcagggcggactgggtgctcaggtaagtatcaaggttacaagacaggtttaaggagaccaatagaaactgggcttgtcgagacagagaagactcttgcgtttctgataggcacctattggtcttactgacatccactttgcctttctctccacaggtagtggttgtcgggcagcagcacggggccgtcgccgatgggggtgttctgctggtagtggtcggcgagctgcacgctgccgtcctcgatgttgtggcggatcttgaagttcaccttgatgccgttcttctgcttgtcggccatgatatagacgttgtggctgttgtagttgtactccagcttgtgccccaggatgttgccgtcctccttgaagtcgatgcccttcagctcgatgcggttcaccagggtgtcgccctcgaacttcacctcggcgcgggtcttgtagttgccgtcgtccttgaagaagatggtgcgctcctggacgtagccttcgggcatggcggacttgaagaagtcgtgctgcttcatgtggtcggggtagcggctgaagcactgcacgccgtaggtcagggtggtcacgagggtgggccagggcacgggcagcttgccggtggtgcagatgaacttcagggtcagcttgccgtaggtggcatcgccctcgccctcgccggacacgctgaacttgtggccgtttacgtcgccgtccagctcgaccaggatgggcaccaccccggtgaacagctcctcgcccttgctcaccatggtggctttaccaacagtaccggaatgccaagcttgggtcctgtgttctggcggcaaacccgttgcgaaaaagaacgttcacggcgactactgcacttatatacggttctcccccaccctcgggaaaaaggcggagccagtacacgacatcactttcccagtttaccccgcgccaccttctctaggcaccggatcaattgccgacccctccccccaacttctcggggactgtgggcgatgtgcgctctgccctcaggccagctttttctttttttttaattttgttaataaaagggaggagatgtagtctcccctcccccagcctgaaacctgcttgctcaggggtggagcttcccgctcatcgctctgccacgcccactgctggaacctgcggagccacacacgtgcacctttctactggaccagagattattcggcgggaatcgggtcccctcccccttccttcataactagtgtcccaacaataaaatttgagctttgatcagaatgaatttgtcttggctccgtttcttctttcgccccgtctagattcctctcttacagctcgagtggccttctcagtcgaaccgttcacgttgcgagctgctggcggccgcaacaggggatccagacatgataagatacattgatgagtttggacaaaccacaactagaatgcagtgaaaaaaatgctttatttgtgaaatttgtgatgctattgctttatttgtaaccattataagctgcaataaacaagttaacaacaacaattgcattcattttatgtttcaggttcagggggaggtgtgggaggttttttcggatcctctagagtcgacctgcaggcatgcaagcttggcgtaatcatggtcatagctgtttcctgtgtgaaattgttatccgctcacaattccacacaacatacgagccggaagcataaagtgtaaagcctggggtgcctaatgagtgagctaactcacattaattgcgttgcgctcactgcccgctttccagtcgggaaacctgtcgtgccagctgcattaatgaatcggccaacgcgcggggagaggcggtttgcgtattgggcgctcttccgcttcctcgctcactgactcgctgcgctcggtcgttcggctgcggcgagcggtatcagctcactcaaaggcggtaatacggttatccacagaatcaggggataacgcaggaaagaacatgtgagcaaaaggccagcaaaaggccaggaaccgtaaaaaggccgcgttgctggcgtttttccataggctccgcccccctgacgagcatcacaaaaatcgacgctcaagtcagaggtggcgaaacccgacaggactataaagataccaggcgtttccccctggaagctccctcgtgcgctctcctgttccgaccctgccgcttaccggatacctgtccgcctttctcccttcgggaagcgtggcgctttctcatagctcacgctgtaggtatctcagttcggtgtaggtcgttcgctccaagctgggctgtgtgcacgaaccccccgttcagcccgaccgctgcgccttatccggtaactatcgtcttgagtccaacccggtaagacacgacttatcgccactggcagcagccactggtaacaggattagcagagcgaggtatgtaggcggtgctacagagttcttgaagtggtggcctaactacggctacactagaaggacagtatttggtatctgcgctctgctgaagccagttaccttcggaaaaagagttggtagctcttgatccggcaaacaaaccaccgctggtagcggtggtttttttgtttgcaagcagcagattacgcgcagaaaaaaaggatctcaagaagatcctttgatcttttctacggggtctgacgctcagtggaacgaaaactcacgttaagggattttggtcatgagattatcaaaaaggatcttcacctagatccttttaaattaaaaatgaagttttaaatcaatctaaagtatatatgagtaaacttggtctgacagttaccaatgcttaatcagtgaggcacctatctcagcgatctgtctatttcgttcatccatagttgcctgactccccgtcgtgtagataactacgatacgggagggcttaccatctggccccagtgctgcaatgataccgcgagacccacgctcaccggctccagatttatcagcaataaaccagccagccggaagggccgagcgcagaagtggtcctgcaactttatccgcctccatccagtctattaattgttgccgggaagctagagtaagtagttcgccagttaatagtttgcgcaacgttgttgccattgctacaggcatcgtggtgtcacgctcgtcgtttggtatggcttcattcagctccggttcccaacgatcaaggcgagttacatgatcccccatgttgtgcaaaaaagcggttagctccttcggtcctccgatcgttgtcagaagtaagttggccgcagtgttatcactcatggttatggcagcactgcataattctcttactgtcatgccatccgtaagatgcttttctgtgactggtgagtactcaaccaagtcattctgagaatagtgtatgcggcgaccgagttgctcttgcccggcgtcaatacgggataataccgcgccacatagcagaactttaaaagtgctcatcattggaaaacgttcttcggggcgaaaactctcaaggatcttaccgctgttgagatccagttcgatgtaacccactcgtgcacccaactgatcttcagcatcttttactttcaccagcgtttctgggtgagcaaaaacaggaaggcaaaatgccgcaaaaaagggaataagggcgacacggaaatgttgaatactcatactcttcctttttcaatattattgaagcatttatcagggttattgtctcatgagcggatacatatttgaatgtatttagaaaaataaacaaataggggttccgcgcacatttccccgaaaagtgccacctgacgtctaagaaaccattattatcatgacattaacctataaaaataggcgtatcacgaggccctttcgtctcgcgcgtttcggtgatgacggtgaaaacctctgacacatgcagctcccggagacggtcacagcttgtctgtaagcggatgccgggagcagacaagcccgtcagggcgcgtcagcgggtgttggcgggtgtcggggctggcttaactatgcggcatcagagcagattgtactgagagtgcaccatatgcggtgtgaaataccgcacagatgcgtaaggagaaaataccgcatcaggcgccattcgccattcaggctgcgcaactgttgggaagggcgatcggtgcgggcctcttcgctattacgccagctggcgaaagggggatgtgctgcaaggcgattaagttgggtaacgccagggttttcccagtcacgacgttgtaaaacgacggccagt

SEQ ID NO: 325 - DNA, 5097 bp, Artificial Sequence
  Description of Artificial Sequence: Synthetic polynucleotide
gaattcgagcttgcatgcctgcaggtcgttacataacttacggtaaatggcccgcctggctgaccgcccaacgacccccgcccattgacgtcaataatgacgtatgttcccatagtaacgccaatagggactttccattgacgtcaatgggtggagtatttacggtaaactgcccacttggcagtacatcaagtgtatcatatgccaagtacgccccctattgacgtcaatgacggtaaatggcccgcctggcattatgcccagtacatgaccttatgggactttcctacttggcagtacatctacgtattagtcatcgctattaccatggtgatgcggttttggcagtacatcaatgggcgtggatagcggtttgactcacggggatttccaagtctccaccccattgacgtcaatgggagtttgttttggcaccaaaatcaacgggactttccaaaatgtcgtaacaactccgccccattgacgcaaatgggcggtaggcgtgtacggtgggaggtctatataagcagagctgagctttgatcagaatgaatttgtcttggctccgtttcttctttcgccccgtctagattcctctcttacagctcgagtggccttctcagtcgaaccgttcacgttgcgagctgctggcggccgcaacattttggcgccagaactgggacctgaagaatggcgaacaaacgacccaacacccgtgcgttttattctgtctttttattgccgatcccccggccgctttacttgtacagctcgtccatgccgagagtgatcccggcggcggtcacgaactccagcaggaccatgtgatcgcgcttctcgttggggtctttgctcagggcggactgggtgctcaggtaagtatcaaggttacaagacaggtttaaggagaccaatagaaactgggcttgtcgagacagagaagactcttgcgtttctgataggcacctattggtcttactgacatccactttgcctttctctccacaggtagtggttgtcgggcagcagcacggggccgtcgccgatgggggtgttctgctggtagtggtcggcgagctgcacgctgccgtcctcgatgttgtggcggatcttgaagttcaccttgatgccgttcttctgcttgtcggccatgatatagacgttgtggctgttgtagttgtactccagcttgtgccccaggatgttgccgtcctccttgaagtcgatgcccttcagctcgatgcggttcaccagggtgtcgccctcgaacttcacctcggcgcgggtcttgtagttgccgtcgtccttgaagaagatggtgcgctcctggacgtagccttcgggcatggcggacttgaagaagtcgtgctgcttcatgtggtcggggtagcggctgaagcactgcacgccgtaggtcagggtggtcacgagggtgggccagggcacgggcagcttgccggtggtgcagatgaacttcagggtcagcttgccgtaggtggcatcgccctcgccctcgccggacacgctgaacttgtggccgtttacgtcgccgtccagctcgaccaggatgggcaccaccccggtgaacagctcctcgcccttgctcaccatggtggctttaccaacagtaccggaatgccaagcttgggtcctgtgttctggcggcaaacccgttgcgaaaaagaacgttcacggcgactactgcacttatatacggttctcccccaccctcgggaaaaaggcggagccagtacacgacatcactttcccagtttaccccgcgccaccttctctaggcaccggatcaattgccgacccctccccccaacttctcggggactgtgggcgatgtgcgctctgccctcaggccagctttttctttttttttaattttgttaataaaagggaggagatgtagtctcccctcccccagcctgaaacctgcttgctcaggggtggagcttcccgctcatcgctctgccacgcccactgctggaacctgcggagccacacacgtgcacctttctactggaccagagattattcggcgggaatcgggtcccctcccccttccttcataactagtgtcccaacaataaaatttgagctttgatcagaatgaatttgtcttggctccgtttcttctttcgccccgtctagattcctctcttacagctcgagtggccttctcagtcgaaccgttcacgttgcgagctgctggcggccgcaacaggggatccagacatgataagatacattgatgagtttggacaaaccacaactagaatgcagtgaaaaaaatgctttatttgtgaaatttgtgatgctattgctttatttgtaaccattataagctgcaataaacaagttaacaacaacaattgcattcattttatgtttcaggttcagggggaggtgtgggaggttttttcggatcctctagagtcgacctgcaggcatgcaagcttggcgtaatcatggtcatagctgtttcctgtgtgaaattgttatccgctcacaattccacacaacatacgagccggaagcataaagtgtaaagcctggggtgcctaatgagtgagctaactcacattaattgcgttgcgctcactgcccgctttccagtcgggaaacctgtcgtgccagctgcattaatgaatcggccaacgcgcggggagaggcggtttgcgtattgggcgctcttccgcttcctcgctcactgactcgctgcgctcggtcgttcggctgcggcgagcggtatcagctcactcaaaggcggtaatacggttatccacagaatcaggggataacgcaggaaagaacatgtgagcaaaaggccagcaaaaggccaggaaccgtaaaaaggccgcgttgctggcgtttttccataggctccgcccccctgacgagcatcacaaaaatcgacgctcaagtcagaggtggcgaaacccgacaggactataaagataccaggcgtttccccctggaagctccctcgtgcgctctcctgttccgaccctgccgcttaccggatacctgtccgcctttctcccttcgggaagcgtggcgctttctcatagctcacgctgtaggtatctcagttcggtgtaggtcgttcgctccaagctgggctgtgtgcacgaaccccccgttcagcccgaccgctgcgccttatccggtaactatcgtcttgagtccaacccggtaagacacgacttatcgccactggcagcagccactggtaacaggattagcagagcgaggtatgtaggcggtgctacagagttcttgaagtggtggcctaactacggctacactagaaggacagtatttggtatctgcgctctgctgaagccagttaccttcggaaaaagagttggtagctcttgatccggcaaacaaaccaccgctggtagcggtggtttttttgtttgcaagcagcagattacgcgcagaaaaaaaggatctcaagaagatcctttgatcttttctacggggtctgacgctcagtggaacgaaaactcacgttaagggattttggtcatgagattatcaaaaaggatcttcacctagatccttttaaattaaaaatgaagttttaaatcaatctaaagtatatatgagtaaacttggtctgacagttaccaatgcttaatcagtgaggcacctatctcagcgatctgtctatttcgttcatccatagttgcctgactccccgtcgtgtagataactacgatacgggagggcttaccatctggccccagtgctgcaatgataccgcgagacccacgctcaccggctccagatttatcagcaataaaccagccagccggaagggccgagcgcagaagtggtcctgcaactttatccgcctccatccagtctattaattgttgccgggaagctagagtaagtagttcgccagttaatagtttgcgcaacgttgttgccattgctacaggcatcgtggtgtcacgctcgtcgtttggtatggcttcattcagctccggttcccaacgatcaaggcgagttacatgatcccccatgttgtgcaaaaaagcggttagctccttcggtcctccgatcgttgtcagaagtaagttggccgcagtgttatcactcatggttatggcagcactgcataattctcttactgtcatgccatccgtaagatgcttttctgtgactggtgagtactcaaccaagtcattctgagaatagtgtatgcggcgaccgagttgctcttgcccggcgtcaatacgggataataccgcgccacatagcagaactttaaaagtgctcatcattggaaaacgttcttcggggcgaaaactctcaaggatcttaccgctgttgagatccagttcgatgtaacccactcgtgcacccaactgatcttcagcatcttttactttcaccagcgtttctgggtgagcaaaaacaggaaggcaaaatgccgcaaaaaagggaataagggcgacacggaaatgttgaatactcatactcttcctttttcaatattattgaagcatttatcagggttattgtctcatgagcggatacatatttgaatgtatttagaaaaataaacaaataggggttccgcgcacatttccccgaaaagtgccacctgacgtctaagaaaccattattatcatgacattaacctataaaaataggcgtatcacgaggccctttcgtctcgcgcgtttcggtgatgacggtgaaaacctctgacacatgcagctcccggagacggtcacagcttgtctgtaagcggatgccgggagcagacaagcccgtcagggcgcgtcagcgggtgttggcgggtgtcggggctggcttaactatgcggcatcagagcagattgtactgagagtgcaccatatgcggtgtgaaataccgcacagatgcgtaaggagaaaataccgcatcaggcgccattcgccattcaggctgcgcaactgttgggaagggcgatcggtgcgggcctcttcgctattacgccagctggcgaaagggggatgtgctgcaaggcgattaagttgggtaacgccagggttttcccagtcacgacgttgtaaaacgacggccagt

SEQ ID NO: 326 - DNA, 7137 bp, Artificial Sequence
  Description of Artificial Sequence: Synthetic polynucleotide
gaattcgagcttgcatgcctgcaggtcgttacataacttacggtaaatggcccgcctggctgaccgcccaacgacccccgcccattgacgtcaataatgacgtatgttcccatagtaacgccaatagggactttccattgacgtcaatgggtggagtatttacggtaaactgcccacttggcagtacatcaagtgtatcatatgccaagtacgccccctattgacgtcaatgacggtaaatggcccgcctggcattatgcccagtacatgaccttatgggactttcctacttggcagtacatctacgtattagtcatcgctattaccatggtgatgcggttttggcagtacatcaatgggcgtggatagcggtttgactcacggggatttccaagtctccaccccattgacgtcaatgggagtttgttttggcaccaaaatcaacgggactttccaaaatgtcgtaacaactccgccccattgacgcaaatgggcggtaggcgtgtacggtgggaggtctatataagcagagctcgtttagtgaaccgtcagagctttgatcagaatgaatttgtcttggctccgtttcttctttcgccccgtctagattcctctcttacagctcgagtggccttctcagtcgaaccgttcacgttgcgagctgctggcggccgcaacattttggcgccagaactgggacctgaagaatggcagagagatgctaagaggaacgctgctttggagctccacaggaaaggatcttcgtatcggacatcggagcaacggacaggtacacatgctagcgctagcttaaaatttcagttttgtaaagtgttgctgaggatgtggtaggatacgaattaagcttgaatcagtgctaacccaacgctggttctgcttgggtcagcagcgtgttaatcggaactagaaacggaaacaggcaggttagccgcagctttttaggaagctgcttaggtggaagaagaaagggtttaaagtcatggatcaggcggttgcccatagttttcaggagttgtttcaggccagaggagtaaggcttgaagtacaattagtaaaaaattttttaggtaagatagatagctgttgcccatggttcaaggaagaagaaacactagattgtggaacctgggagaaagttggtgaggccttaaaaatcactcaggcagataattttaccctagaatttggggtagaggctcagtttgtgttttttcacgagatgaagatggagcacggtggctgccagagagattaattcgtcagacgaacacagattctgactcttctggtaagtatcattctaaagactaaaattccttttgtgcttaaaattcagctgagagcaacagctctcaaagctgttctccagctactctctgagccagctcccgacaggaggccggagactagcctcagctttacaatttgcatttgaacaaacgacccaacacccgtgcgttttattctgtctttttattgccgatcccccggccgctttacttgtacagctcgtccatgccgagagtgatcccggcggcggtcacgaactccagcaggaccatgtgatcgcgcttctcgttggggtctttgctcagggcggactgggtgctcaggtaagtatcaaggttacaagacaggtttaaggagaccaatagaaactgggcttgtcgagacagagaagactcttgcgtttctgataggcacctattggtcttactgacatccactttgcctttctctccacaggtagtggttgtcgggcagcagcacggggccgtcgccgatgggggtgttctgctggtagtggtcggcgagctgcacgctgccgtcctcgatgttgtggcggatcttgaagttcaccttgatgccgttcttctgcttgtcggccatgatatagacgttgtggctgttgtagttgtactccagcttgtgccccaggatgttgccgtcctccttgaagtcgatgcccttcagctcgatgcggttcaccagggtgtcgccctcgaacttcacctcggcgcgggtcttgtagttgccgtcgtccttgaagaagatggtgcgctcctggacgtagccttcgggcatggcggacttgaagaagtcgtgctgcttcatgtggtcggggtagcggctgaagcactgcacgccgtaggtcagggtggtcacgagggtgggccagggcacgggcagcttgccggtggtgcagatgaacttcagggtcagcttgccgtaggtggcatcgccctcgccctcgccggacacgctgaacttgtggccgtttacgtcgccgtccagctcgaccaggatgggcaccaccccggtgaacagctcctcgcccttgctcaccatggtggctttaccaacagtaccggaatgccaagcttgggtcctgtgttctggcggcaaacccgttgcgaaaaagaacgttcacggcgactactgcacttatatacggttctcccccaccctcgggaaaaaggcggagccagtacacgacatcactttcccagtttaccccgcgccaccttctctaggcaccggatcaattgccgacccctccccccaacttctcggggactgtgggcgatgtgcgctctgcccaaataaagtacctagacttccccgaaaaaagttctgcttttctactttctcactgtctttcaagattttgtctttcaagcaggtaaatcaacattctcgaggcggaccagcggatgtgcatccccgcccccctagagcactcaggtggcagctgttatccccagtctcaggacattccagcatgtggccttcagtctgagttaaaaattaggtttacccagaggactagaatagtagatatttctatattaataaagattggtttttattttgatagacaggcttagccccttagctgacctctggcttttcacccttgctgttactgcaaggtgtctttagctcaataaggctgtggaaaaaaacagggatgaggaggaacggctcccagctcctattttagccacaaatcgtggtgttactaacgacataattcttgcttaggctttgctaaatctgaggttgataattctcctttaggagctgcacagcgctcagaactgtgcatactgatttgtgatggtacaaattcagtatgggcatcgcttggtgcagatggaggtactgcaaggaaaggtcccagcttgaccatttctgagtttcctgtgagataaacccggtttgaaagaggttggtaccaaattatatatccctcggctctacctcgcctccccaaaaggtaccagagccacaggtgtggattttaacagaatccacgggaggaatcgggtccatgtccacccaagccaaggttaaaagcccactcatctacggatgagaaaatcatttgatcacctcagttaagcgctgccttattttaacttaattaataggggggagagagattggagacttactattgaaagggcaagcccttcactgcctcccacccaaataaaaaagccaattggccttgtactacagagctggccggaccccttatccctgttacccaccaatcatccaaaaatgcggaggaatatcaacttagtgttattcttattatagtgtatttcacacttgttcagtcaaacttagccagagttccaacgccctacttaaaattcaactagaaagttacctaccaagtactaattagcattataaagtcagagcctacagctccaggcttttcagttagttgtttactaagataagaaaagacagtcttagccagatacagtttaccataataaaagttaaagaatcccagggaagcaagttttttcttttagccctagattccaggcagaactattgagcatagataatttttccccctcaggccagctttttctttttttttaattttgttaataaaagggaggagatgtagtctcccctcccccagcctgaaacctgcttgctcaggggtggagcttcccgctcatcgctctgccacgcccactgctggaacctgcggagccacacacgtgcacctttctactggaccagagattattcggcgggaatcgggtcccctcccccttccttcataactagtgtcccaacaataaaatttgagctttgatcagaatgaatttgtcttggctccgtttcttctttcgccccgtctagattcctctcttacagctcgagtggccttctcagtcgaaccgttcacgttgcgagctgctggcggccgcaacaggggatccagacatgataagatacattgatgagtttggacaaaccacaactagaatgcagtgaaaaaaatgctttatttgtgaaatttgtgatgctattgctttatttgtaaccattataagctgcaataaacaagttaacaacaacaattgcattcattttatgtttcaggttcagggggaggtgtgggaggttttttcggatcctctagagtcgacctgcaggcatgcaagcttggcgtaatcatggtcatagctgtttcctgtgtgaaattgttatccgctcacaattccacacaacatacgagccggaagcataaagtgtaaagcctggggtgcctaatgagtgagctaactcacattaattgcgttgcgctcactgcccgctttccagtcgggaaacctgtcgtgccagctgcattaatgaatcggccaacgcgcggggagaggcggtttgcgtattgggcgctcttccgcttcctcgctcactgactcgctgcgctcggtcgttcggctgcggcgagcggtatcagctcactcaaaggcggtaatacggttatccacagaatcaggggataacgcaggaaagaacatgtgagcaaaaggccagcaaaaggccaggaaccgtaaaaaggccgcgttgctggcgtttttccataggctccgcccccctgacgagcatcacaaaaatcgacgctcaagtcagaggtggcgaaacccgacaggactataaagataccaggcgtttccccctggaagctccctcgtgcgctctcctgttccgaccctgccgcttaccggatacctgtccgcctttctcccttcgggaagcgtggcgctttctcatagctcacgctgtaggtatctcagttcggtgtaggtcgttcgctccaagctgggctgtgtgcacgaaccccccgttcagcccgaccgctgcgccttatccggtaactatcgtcttgagtccaacccggtaagacacgacttatcgccactggcagcagccactggtaacaggattagcagagcgaggtatgtaggcggtgctacagagttcttgaagtggtggcctaactacggctacactagaaggacagtatttggtatctgcgctctgctgaagccagttaccttcggaaaaagagttggtagctcttgatccggcaaacaaaccaccgctggtagcggtggtttttttgtttgcaagcagcagattacgcgcagaaaaaaaggatctcaagaagatcctttgatcttttctacggggtctgacgctcagtggaacgaaaactcacgttaagggattttggtcatgagattatcaaaaaggatcttcacctagatccttttaaattaaaaatgaagttttaaatcaatctaaagtatatatgagtaaacttggtctgacagttaccaatgcttaatcagtgaggcacctatctcagcgatctgtctatttcgttcatccatagttgcctgactccccgtcgtgtagataactacgatacgggagggcttaccatctggccccagtgctgcaatgataccgcgagacccacgctcaccggctccagatttatcagcaataaaccagccagccggaagggccgagcgcagaagtggtcctgcaactttatccgcctccatccagtctattaattgttgccgggaagctagagtaagtagttcgccagttaatagtttgcgcaacgttgttgccattgctacaggcatcgtggtgtcacgctcgtcgtttggtatggcttcattcagctccggttcccaacgatcaaggcgagttacatgatcccccatgttgtgcaaaaaagcggttagctccttcggtcctccgatcgttgtcagaagtaagttggccgcagtgttatcactcatggttatggcagcactgcataattctcttactgtcatgccatccgtaagatgcttttctgtgactggtgagtactcaaccaagtcattctgagaatagtgtatgcggcgaccgagttgctcttgcccggcgtcaatacgggataataccgcgccacatagcagaactttaaaagtgctcatcattggaaaacgttcttcggggcgaaaactctcaaggatcttaccgctgttgagatccagttcgatgtaacccactcgtgcacccaactgatcttcagcatcttttactttcaccagcgtttctgggtgagcaaaaacaggaaggcaaaatgccgcaaaaaagggaataagggcgacacggaaatgttgaatactcatactcttcctttttcaatattattgaagcatttatcagggttattgtctcatgagcggatacatatttgaatgtatttagaaaaataaacaaataggggttccgcgcacatttccccgaaaagtgccacctgacgtctaagaaaccattattatcatgacattaacctataaaaataggcgtatcacgaggccctttcgtctcgcgcgtttcggtgatgacggtgaaaacctctgacacatgcagctcccggagacggtcacagcttgtctgtaagcggatgccgggagcagacaagcccgtcagggcgcgtcagcgggtgttggcgggtgtcggggctggcttaactatgcggcatcagagcagattgtactgagagtgcaccatatgcggtgtgaaataccgcacagatgcgtaaggagaaaataccgcatcaggcgccattcgccattcaggctgcgcaactgttgggaagggcgatcggtgcgggcctcttcgctattacgccagctggcgaaagggggatgtgctgcaaggcgattaagttgggtaacgccagggttttcccagtcacgacgttgtaaaacgacggccagt

SEQ ID NO: 327 - DNA, 7135 bp, Artificial Sequence
  Description of Artificial Sequence: Synthetic polynucleotide
gaattcgagcttgcatgcctgcaggtcgttacataacttacggtaaatggcccgcctggctgaccgcccaacgacccccgcccattgacgtcaataatgacgtatgttcccatagtaacgccaatagggactttccattgacgtcaatgggtggagtatttacggtaaactgcccacttggcagtacatcaagtgtatcatatgccaagtacgccccctattgacgtcaatgacggtaaatggcccgcctggcattatgcccagtacatgaccttatgggactttcctacttggcagtacatctacgtattagtcatcgctattaccatggtgatgcggttttggcagtacatcaatgggcgtggatagcggtttgactcacggggatttccaagtctccaccccattgacgtcaatgggagtttgttttggcaccaaaatcaacgggactttccaaaatgtcgtaacaactccgccccattgacgcaaatgggcggtaggcgtgtacggtgggaggtctatataagcagagctcgtttagtgaaccgtcagctttgatcagaatgaatttgtcttggctccgtttcttctttcgccccgtctagattcctctcttacagctcgagtggccttctcagtcgaaccgttcacgttgcgagctgctggcggccgcaacattttggcgccagaactgggacctgaagaatggcagagagatgctaagaggaacgctgctttggagctccacaggaaaggatcttcgtatcggacatcggagcaacggacaggtacacatgctagcgctagcttaaaatttcagttttgtaaagtgttgctgaggatgtggtaggatacgaattaagcttgaatcagtgctaacccaacgctggttctgcttgggtcagcagcgtgttaatcggaactagaaacggaaacaggcaggttagccgcagctttttaggaagctgcttaggtggaagaagaaagggtttaaagtcatggatcaggcggttgcccatagttttcaggagttgtttcaggccagaggagtaaggcttgaagtacaattagtaaaaaattttttaggtaagatagatagctgttgcccatggttcaaggaagaagaaacactagattgtggaacctgggagaaagttggtgaggccttaaaaatcactcaggcagataattttaccctagaatttggggtagaggctcagtttgtgttttttcacgagatgaagatggagcacggtggctgccagagagattaattcgtcagacgaacacagattctgactcttctggtaagtatcattctaaagactaaaattccttttgtgcttaaaattcagctgagagcaacagctctcaaagctgttctccagctactctctgagccagctcccgacaggaggccggagactagcctcagctttacaatttgcatttgaacaaacgacccaacacccgtgcgttttattctgtctttttattgccgatcccccggccgctttacttgtacagctcgtccatgccgagagtgatcccggcggcggtcacgaactccagcaggaccatgtgatcgcgcttctcgttggggtctttgctcagggcggactgggtgctcaggtaagtatcaaggttacaagacaggtttaaggagaccaatagaaactgggcttgtcgagacagagaagactcttgcgtttctgataggcacctattggtcttactgacatccactttgcctttctctccacaggtagtggttgtcgggcagcagcacggggccgtcgccgatgggggtgttctgctggtagtggtcggcgagctgcacgctgccgtcctcgatgttgtggcggatcttgaagttcaccttgatgccgttcttctgcttgtcggccatgatatagacgttgtggctgttgtagttgtactccagcttgtgccccaggatgttgccgtcctccttgaagtcgatgcccttcagctcgatgcggttcaccagggtgtcgccctcgaacttcacctcggcgcgggtcttgtagttgccgtcgtccttgaagaagatggtgcgctcctggacgtagccttcgggcatggcggacttgaagaagtcgtgctgcttcatgtggtcggggtagcggctgaagcactgcacgccgtaggtcagggtggtcacgagggtgggccagggcacgggcagcttgccggtggtgcagatgaacttcagggtcagcttgccgtaggtggcatcgccctcgccctcgccggacacgctgaacttgtggccgtttacgtcgccgtccagctcgaccaggatgggcaccaccccggtgaacagctcctcgcccttgctcaccatggtggctttaccaacagtaccggaatgccaagcttgggtcctgtgttctggcggcaaacccgttgcgaaaaagaacgttcacggcgactactgcacttatatacggttctcccccaccctcgggaaaaaggcggagccagtacacgacatcactttcccagtttaccccgcgccaccttctctaggcaccggatcaattgccgacccctccccccaacttctcggggactgtgggcgatgtgcgctctgcccaaataaagtacctagacttccccgaaaaaagttctgcttttctactttctcactgtctttcaagattttgtctttcaagcaggtaaatcaacattctcgaggcggaccagcggatgtgcatccccgcccccctagagcactcaggtggcagctgttatccccagtctcaggacattccagcatgtggccttcagtctgagttaaaaattaggtttacccagaggactagaatagtagatatttctatattaataaagattggtttttattttgatagacaggcttagccccttagctgacctctggcttttcacccttgctgttactgcaaggtgtctttagctcaataaggctgtggaaaaaaacagggatgaggaggaacggctcccagctcctattttagccacaaatcgtggtgttactaacgacataattcttgcttaggctttgctaaatctgaggttgataattctcctttaggagctgcacagcgctcagaactgtgcatactgatttgtgatggtacaaattcagtatgggcatcgcttggtgcagatggaggtactgcaaggaaaggtcccagcttgaccatttctgagtttcctgtgagataaacccggtttgaaagaggttggtaccaaattatatatccctcggctctacctcgcctccccaaaaggtaccagagccacaggtgtggattttaacagaatccacgggaggaatcgggtccatgtccacccaagccaaggttaaaagcccactcatctacggatgagaaaatcatttgatcacctcagttaagcgctgccttattttaacttaattaataggggggagagagattggagacttactattgaaagggcaagcccttcactgcctcccacccaaataaaaaagccaattggccttgtactacagagctggccggaccccttatccctgttacccaccaatcatccaaaaatgcggaggaatatcaacttagtgttattcttattatagtgtatttcacacttgttcagtcaaacttagccagagttccaacgccctacttaaaattcaactagaaagttacctaccaagtactaattagcattataaagtcagagcctacagctccaggcttttcagttagttgtttactaagataagaaaagacagtcttagccagatacagtttaccataataaaagttaaagaatcccagggaagcaagttttttcttttagccctagattccaggcagaactattgagcatagataatttttccccctcaggccagctttttctttttttttaattttgttaataaaagggaggagatgtagtctcccctcccccagcctgaaacctgcttgctcaggggtggagcttcccgctcatcgctctgccacgcccactgctggaacctgcggagccacacacgtgcacctttctactggaccagagattattcggcgggaatcgggtcccctcccccttccttcataactagtgtcccaacaataaaatttgagctttgatcagaatgaatttgtcttggctccgtttcttctttcgccccgtctagattcctctcttacagctcgagtggccttctcagtcgaaccgttcacgttgcgagctgctggcggccgcaacaggggatccagacatgataagatacattgatgagtttggacaaaccacaactagaatgcagtgaaaaaaatgctttatttgtgaaatttgtgatgctattgctttatttgtaaccattataagctgcaataaacaagttaacaacaacaattgcattcattttatgtttcaggttcagggggaggtgtgggaggttttttcggatcctctagagtcgacctgcaggcatgcaagcttggcgtaatcatggtcatagctgtttcctgtgtgaaattgttatccgctcacaattccacacaacatacgagccggaagcataaagtgtaaagcctggggtgcctaatgagtgagctaactcacattaattgcgttgcgctcactgcccgctttccagtcgggaaacctgtcgtgccagctgcattaatgaatcggccaacgcgcggggagaggcggtttgcgtattgggcgctcttccgcttcctcgctcactgactcgctgcgctcggtcgttcggctgcggcgagcggtatcagctcactcaaaggcggtaatacggttatccacagaatcaggggataacgcaggaaagaacatgtgagcaaaaggccagcaaaaggccaggaaccgtaaaaaggccgcgttgctggcgtttttccataggctccgcccccctgacgagcatcacaaaaatcgacgctcaagtcagaggtggcgaaacccgacaggactataaagataccaggcgtttccccctggaagctccctcgtgcgctctcctgttccgaccctgccgcttaccggatacctgtccgcctttctcccttcgggaagcgtggcgctttctcatagctcacgctgtaggtatctcagttcggtgtaggtcgttcgctccaagctgggctgtgtgcacgaaccccccgttcagcccgaccgctgcgccttatccggtaactatcgtcttgagtccaacccggtaagacacgacttatcgccactggcagcagccactggtaacaggattagcagagcgaggtatgtaggcggtgctacagagttcttgaagtggtggcctaactacggctacactagaaggacagtatttggtatctgcgctctgctgaagccagttaccttcggaaaaagagttggtagctcttgatccggcaaacaaaccaccgctggtagcggtggtttttttgtttgcaagcagcagattacgcgcagaaaaaaaggatctcaagaagatcctttgatcttttctacggggtctgacgctcagtggaacgaaaactcacgttaagggattttggtcatgagattatcaaaaaggatcttcacctagatccttttaaattaaaaatgaagttttaaatcaatctaaagtatatatgagtaaacttggtctgacagttaccaatgcttaatcagtgaggcacctatctcagcgatctgtctatttcgttcatccatagttgcctgactccccgtcgtgtagataactacgatacgggagggcttaccatctggccccagtgctgcaatgataccgcgagacccacgctcaccggctccagatttatcagcaataaaccagccagccggaagggccgagcgcagaagtggtcctgcaactttatccgcctccatccagtctattaattgttgccgggaagctagagtaagtagttcgccagttaatagtttgcgcaacgttgttgccattgctacaggcatcgtggtgtcacgctcgtcgtttggtatggcttcattcagctccggttcccaacgatcaaggcgagttacatgatcccccatgttgtgcaaaaaagcggttagctccttcggtcctccgatcgttgtcagaagtaagttggccgcagtgttatcactcatggttatggcagcactgcataattctcttactgtcatgccatccgtaagatgcttttctgtgactggtgagtactcaaccaagtcattctgagaatagtgtatgcggcgaccgagttgctcttgcccggcgtcaatacgggataataccgcgccacatagcagaactttaaaagtgctcatcattggaaaacgttcttcggggcgaaaactctcaaggatcttaccgctgttgagatccagttcgatgtaacccactcgtgcacccaactgatcttcagcatcttttactttcaccagcgtttctgggtgagcaaaaacaggaaggcaaaatgccgcaaaaaagggaataagggcgacacggaaatgttgaatactcatactcttcctttttcaatattattgaagcatttatcagggttattgtctcatgagcggatacatatttgaatgtatttagaaaaataaacaaataggggttccgcgcacatttccccgaaaagtgccacctgacgtctaagaaaccattattatcatgacattaacctataaaaataggcgtatcacgaggccctttcgtctcgcgcgtttcggtgatgacggtgaaaacctctgacacatgcagctcccggagacggtcacagcttgtctgtaagcggatgccgggagcagacaagcccgtcagggcgcgtcagcgggtgttggcgggtgtcggggctggcttaactatgcggcatcagagcagattgtactgagagtgcaccatatgcggtgtgaaataccgcacagatgcgtaaggagaaaataccgcatcaggcgccattcgccattcaggctgcgcaactgttgggaagggcgatcggtgcgggcctcttcgctattacgccagctggcgaaagggggatgtgctgcaaggcgattaagttgggtaacgccagggttttcccagtcacgacgttgtaaaacgacggccagt

SEQ ID NO: 328 - DNA, 7120 bp, Artificial Sequence
  Description of Artificial Sequence: Synthetic polynucleotide
gaattcgagcttgcatgcctgcaggtcgttacataacttacggtaaatggcccgcctggctgaccgcccaacgacccccgcccattgacgtcaataatgacgtatgttcccatagtaacgccaatagggactttccattgacgtcaatgggtggagtatttacggtaaactgcccacttggcagtacatcaagtgtatcatatgccaagtacgccccctattgacgtcaatgacggtaaatggcccgcctggcattatgcccagtacatgaccttatgggactttcctacttggcagtacatctacgtattagtcatcgctattaccatggtgatgcggttttggcagtacatcaatgggcgtggatagcggtttgactcacggggatttccaagtctccaccccattgacgtcaatgggagtttgttttggcaccaaaatcaacgggactttccaaaatgtcgtaacaactccgccccattgacgcaaatgggcggtaggcgtgtacggtgggaggtctatataagcagagctgagctttgatcagaatgaatttgtcttggctccgtttcttctttcgccccgtctagattcctctcttacagctcgagtggccttctcagtcgaaccgttcacgttgcgagctgctggcggccgcaacattttggcgccagaactgggacctgaagaatggcagagagatgctaagaggaacgctgctttggagctccacaggaaaggatcttcgtatcggacatcggagcaacggacaggtacacatgctagcgctagcttaaaatttcagttttgtaaagtgttgctgaggatgtggtaggatacgaattaagcttgaatcagtgctaacccaacgctggttctgcttgggtcagcagcgtgttaatcggaactagaaacggaaacaggcaggttagccgcagctttttaggaagctgcttaggtggaagaagaaagggtttaaagtcatggatcaggcggttgcccatagttttcaggagttgtttcaggccagaggagtaaggcttgaagtacaattagtaaaaaattttttaggtaagatagatagctgttgcccatggttcaaggaagaagaaacactagattgtggaacctgggagaaagttggtgaggccttaaaaatcactcaggcagataattttaccctagaatttggggtagaggctcagtttgtgttttttcacgagatgaagatggagcacggtggctgccagagagattaattcgtcagacgaacacagattctgactcttctggtaagtatcattctaaagactaaaattccttttgtgcttaaaattcagctgagagcaacagctctcaaagctgttctccagctactctctgagccagctcccgacaggaggccggagactagcctcagctttacaatttgcatttgaacaaacgacccaacacccgtgcgttttattctgtctttttattgccgatcccccggccgctttacttgtacagctcgtccatgccgagagtgatcccggcggcggtcacgaactccagcaggaccatgtgatcgcgcttctcgttggggtctttgctcagggcggactgggtgctcaggtaagtatcaaggttacaagacaggtttaaggagaccaatagaaactgggcttgtcgagacagagaagactcttgcgtttctgataggcacctattggtcttactgacatccactttgcctttctctccacaggtagtggttgtcgggcagcagcacggggccgtcgccgatgggggtgttctgctggtagtggtcggcgagctgcacgctgccgtcctcgatgttgtggcggatcttgaagttcaccttgatgccgttcttctgcttgtcggccatgatatagacgttgtggctgttgtagttgtactccagcttgtgccccaggatgttgccgtcctccttgaagtcgatgcccttcagctcgatgcggttcaccagggtgtcgccctcgaacttcacctcggcgcgggtcttgtagttgccgtcgtccttgaagaagatggtgcgctcctggacgtagccttcgggcatggcggacttgaagaagtcgtgctgcttcatgtggtcggggtagcggctgaagcactgcacgccgtaggtcagggtggtcacgagggtgggccagggcacgggcagcttgccggtggtgcagatgaacttcagggtcagcttgccgtaggtggcatcgccctcgccctcgccggacacgctgaacttgtggccgtttacgtcgccgtccagctcgaccaggatgggcaccaccccggtgaacagctcctcgcccttgctcaccatggtggctttaccaacagtaccggaatgccaagcttgggtcctgtgttctggcggcaaacccgttgcgaaaaagaacgttcacggcgactactgcacttatatacggttctcccccaccctcgggaaaaaggcggagccagtacacgacatcactttcccagtttaccccgcgccaccttctctaggcaccggatcaattgccgacccctccccccaacttctcggggactgtgggcgatgtgcgctctgcccaaataaagtacctagacttccccgaaaaaagttctgcttttctactttctcactgtctttcaagattttgtctttcaagcaggtaaatcaacattctcgaggcggaccagcggatgtgcatccccgcccccctagagcactcaggtggcagctgttatccccagtctcaggacattccagcatgtggccttcagtctgagttaaaaattaggtttacccagaggactagaatagtagatatttctatattaataaagattggtttttattttgatagacaggcttagccccttagctgacctctggcttttcacccttgctgttactgcaaggtgtctttagctcaataaggctgtggaaaaaaacagggatgaggaggaacggctcccagctcctattttagccacaaatcgtggtgttactaacgacataattcttgcttaggctttgctaaatctgaggttgataattctcctttaggagctgcacagcgctcagaactgtgcatactgatttgtgatggtacaaattcagtatgggcatcgcttggtgcagatggaggtactgcaaggaaaggtcccagcttgaccatttctgagtttcctgtgagataaacccggtttgaaagaggttggtaccaaattatatatccctcggctctacctcgcctccccaaaaggtaccagagccacaggtgtggattttaacagaatccacgggaggaatcgggtccatgtccacccaagccaaggttaaaagcccactcatctacggatgagaaaatcatttgatcacctcagttaagcgctgccttattttaacttaattaataggggggagagagattggagacttactattgaaagggcaagcccttcactgcctcccacccaaataaaaaagccaattggccttgtactacagagctggccggaccccttatccctgttacccaccaatcatccaaaaatgcggaggaatatcaacttagtgttattcttattatagtgtatttcacacttgttcagtcaaacttagccagagttccaacgccctacttaaaattcaactagaaagttacctaccaagtactaattagcattataaagtcagagcctacagctccaggcttttcagttagttgtttactaagataagaaaagacagtcttagccagatacagtttaccataataaaagttaaagaatcccagggaagcaagttttttcttttagccctagattccaggcagaactattgagcatagataatttttccccctcaggccagctttttctttttttttaattttgttaataaaagggaggagatgtagtctcccctcccccagcctgaaacctgcttgctcaggggtggagcttcccgctcatcgctctgccacgcccactgctggaacctgcggagccacacacgtgcacctttctactggaccagagattattcggcgggaatcgggtcccctcccccttccttcataactagtgtcccaacaataaaatttgagctttgatcagaatgaatttgtcttggctccgtttcttctttcgccccgtctagattcctctcttacagctcgagtggccttctcagtcgaaccgttcacgttgcgagctgctggcggccgcaacaggggatccagacatgataagatacattgatgagtttggacaaaccacaactagaatgcagtgaaaaaaatgctttatttgtgaaatttgtgatgctattgctttatttgtaaccattataagctgcaataaacaagttaacaacaacaattgcattcattttatgtttcaggttcagggggaggtgtgggaggttttttcggatcctctagagtcgacctgcaggcatgcaagcttggcgtaatcatggtcatagctgtttcctgtgtgaaattgttatccgctcacaattccacacaacatacgagccggaagcataaagtgtaaagcctggggtgcctaatgagtgagctaactcacattaattgcgttgcgctcactgcccgctttccagtcgggaaacctgtcgtgccagctgcattaatgaatcggccaacgcgcggggagaggcggtttgcgtattgggcgctcttccgcttcctcgctcactgactcgctgcgctcggtcgttcggctgcggcgagcggtatcagctcactcaaaggcggtaatacggttatccacagaatcaggggataacgcaggaaagaacatgtgagcaaaaggccagcaaaaggccaggaaccgtaaaaaggccgcgttgctggcgtttttccataggctccgcccccctgacgagcatcacaaaaatcgacgctcaagtcagaggtggcgaaacccgacaggactataaagataccaggcgtttccccctggaagctccctcgtgcgctctcctgttccgaccctgccgcttaccggatacctgtccgcctttctcccttcgggaagcgtggcgctttctcatagctcacgctgtaggtatctcagttcggtgtaggtcgttcgctccaagctgggctgtgtgcacgaaccccccgttcagcccgaccgctgcgccttatccggtaactatcgtcttgagtccaacccggtaagacacgacttatcgccactggcagcagccactggtaacaggattagcagagcgaggtatgtaggcggtgctacagagttcttgaagtggtggcctaactacggctacactagaaggacagtatttggtatctgcgctctgctgaagccagttaccttcggaaaaagagttggtagctcttgatccggcaaacaaaccaccgctggtagcggtggtttttttgtttgcaagcagcagattacgcgcagaaaaaaaggatctcaagaagatcctttgatcttttctacggggtctgacgctcagtggaacgaaaactcacgttaagggattttggtcatgagattatcaaaaaggatcttcacctagatccttttaaattaaaaatgaagttttaaatcaatctaaagtatatatgagtaaacttggtctgacagttaccaatgcttaatcagtgaggcacctatctcagcgatctgtctatttcgttcatccatagttgcctgactccccgtcgtgtagataactacgatacgggagggcttaccatctggccccagtgctgcaatgataccgcgagacccacgctcaccggctccagatttatcagcaataaaccagccagccggaagggccgagcgcagaagtggtcctgcaactttatccgcctccatccagtctattaattgttgccgggaagctagagtaagtagttcgccagttaatagtttgcgcaacgttgttgccattgctacaggcatcgtggtgtcacgctcgtcgtttggtatggcttcattcagctccggttcccaacgatcaaggcgagttacatgatcccccatgttgtgcaaaaaagcggttagctccttcggtcctccgatcgttgtcagaagtaagttggccgcagtgttatcactcatggttatggcagcactgcataattctcttactgtcatgccatccgtaagatgcttttctgtgactggtgagtactcaaccaagtcattctgagaatagtgtatgcggcgaccgagttgctcttgcccggcgtcaatacgggataataccgcgccacatagcagaactttaaaagtgctcatcattggaaaacgttcttcggggcgaaaactctcaaggatcttaccgctgttgagatccagttcgatgtaacccactcgtgcacccaactgatcttcagcatcttttactttcaccagcgtttctgggtgagcaaaaacaggaaggcaaaatgccgcaaaaaagggaataagggcgacacggaaatgttgaatactcatactcttcctttttcaatattattgaagcatttatcagggttattgtctcatgagcggatacatatttgaatgtatttagaaaaataaacaaataggggttccgcgcacatttccccgaaaagtgccacctgacgtctaagaaaccattattatcatgacattaacctataaaaataggcgtatcacgaggccctttcgtctcgcgcgtttcggtgatgacggtgaaaacctctgacacatgcagctcccggagacggtcacagcttgtctgtaagcggatgccgggagcagacaagcccgtcagggcgcgtcagcgggtgttggcgggtgtcggggctggcttaactatgcggcatcagagcagattgtactgagagtgcaccatatgcggtgtgaaataccgcacagatgcgtaaggagaaaataccgcatcaggcgccattcgccattcaggctgcgcaactgttgggaagggcgatcggtgcgggcctcttcgctattacgccagctggcgaaagggggatgtgctgcaaggcgattaagttgggtaacgccagggttttcccagtcacgacgttgtaaaacgacggccagt

SEQ ID NO: 329 - protein, 578 aa, Artificial Sequence
  Description of Artificial Sequence: Synthetic polypeptide
MDQAVAHSFQELFQARGVRLEVQLVKNFLGKIDSCCPWFKEEETLDCGTWEKVGEALKITQADNFTLGLWALINDAIKDATSPGLSCPQAELVVSQEECLSERASSEKDLLNSKIDKCGNSDEKLIFNKNHSDRGAAHYLNENWSSCESPAQPVVPTSGGATHRDTRLSELEFEIKLQRLTNELRELKKMSEAEKSNSSVVHQVPLEKVVSQAHGKGQNISNTLAFPVVEVVDQQDTRGRHYQTLDFKLIKELKAAVVQYGPSAPFTQALLDTVVESHLTPLDWKTLSKATLSGGDFLLWDSEWRDASKKTAASNAQAGNSDWDSNMLLGEGPYEGQTNQIDFPVAVYAQIATAARRAWGRLPVKGEIGGSLASIRQSSDEPYQDFVDRLLISASRILGNPDTGSPFVMQLAYENANAICRAAIQPHKGTTDLAGYVRLCADIGPSCETLQGTHAQAMFSRKRGNSACFKCGSLDHFRIDCPQNKGAEVRQTGRAPGICPRCGKGRHWAKDCKHKTRVLSRPVPGNEERGQPQAPSYSKKTAYGALNLLPSQQDQFLSLSGQTQETQDWTSVPLSMQH

SEQ ID NO: 330 - protein, 318 aa, Artificial Sequence
  Description of Artificial Sequence: Synthetic polypeptide
NEGFEPPGAGKRGKGSAPGPKLLKEDSLWGSKSAAQPTRSVLELVRSNPGNARLDLCSTVHAALTPEVGVQTLPTGVFGPLPVGTCGFLLGRSSSIVEGLQIYPGVISNDYEGEIKIIAACPRGAITIPANQKIAQLTLIPLRWSLSKFSKNEEGQINFDSSGVNWVKSITNQRPNLKLILDGKSFEGLIDTGADVTIIRGQDWPSNWPLSVSLTHLQGIGYASNPKRSSKLLTWRDEDGKSGNIQPYVMQNLPVTLWGRDLLSQMGVILCSSKEMVTEQTFRQGPLPDRGLIKKGQKIKTFEDLKPHSNVRGLKYFQ

SEQ ID NO: 331 - protein, 868 aa, Artificial Sequence
  Description of Artificial Sequence: Synthetic polypeptide
RERFKVFSVVAAVLPASHAEKIQWRNDIPVWVDQWSLPKEKIEAASLLVQEQLEAGHLVESHSPWNTPIFIIRKKSGKWRLLQDLRKVNETMVLMGTLQPGLPSPVAIPKGYYKIVIDLKDCFFTIPLHPEDCERFAFSVPSVNFKEPMKRYQWTVLPQGMANSPTLCQKFVAKAIQPVRQQWPNIYIIHFTDDVLMAGKDPQDLLLCYGDLRKALADKGLQIASEKIQTQDPYNYLGFRLTDQAVFHQKIVIRRDNLRTLNDFQKLLGDINWLRPYLKLTTGELKPLFDILKGSSDPTSPRSLTSEGLLALQLVEKAIEEQFVTYIDYSLPLHLLIFNTTHVPTGLLWQKFPIMWIHSRISPKRNILPYHEAVAQMIITGRRQALTYFGKEPDIIVQPYSVSQDTWLKQHSTDWLLAQLGFEGTIDSHYPQDRLIKFLNVHDMIFPKMTSLQPLNNALLIFTDGSSKGRAGYLISNQQVIVETPGLSAQLAELTAVLKVFQSVQEAFNIFTDSLYVAQSVPLLETCGTFNFNTPSGSLFSELQNIILARKNPFYIGHIRSHSGLPGPLAEGNNCIDRALIGEALVSDRVALAQRDHERFHLSSHTLRLRHKITKEQARMIVKQCPKCITLSPVPHLGVNPRGLMPNHIWQMDITHYAEFGKLKYIHVCIDTCSGFLFASLHTGEASKNVIDHCLQAFNAMGLPKLIKTDNGPSYSSKNFISFCKEFGIKHKTGIPYNPMGQGIVERAHRTLKNWLFKTKEGQLYPPRSPKAHLAFTLFVLNFLHTDIKGQSAADRHWHPVTSNSYALVKWKDPLTNEWKGPDPVLIWGRGSVCVFSRDEDGARWLPERLIRQTNTDSDSSGKYHSKD

SEQ ID NO: 332 - DNA, 191 bp, Artificial Sequence
  Description of Artificial Sequence: Synthetic polynucleotide
tgtagtctcccctcccctagcctgaaacctgcttgctcggggtggagcttcctgctcattcgttctgccacgcccactgctggaacctgaggagccacacacgtgcacctttctactggaccagagattattcggcgggaatcgggtcccctcccccttccttcataactggtgtcgcaacaataaaattt

SEQ ID NO: 333 - DNA, 12 bp, Artificial Sequence
  Description of Artificial Sequence: Synthetic oligonucleotide
gagccttgatca

SEQ ID NO: 334 - DNA, 10 bp, Artificial Sequence
  Description of Artificial Sequence: Synthetic oligonucleotide
gccttgatca

SEQ ID NO: 335 - DNA, 114 bp, Artificial Sequence
  Description of Artificial Sequence: Synthetic polynucleotide
gagtaactgtcttggctacatttcttcttttgccccgtctagattcctctcttacagctcgagcggccttctcagtcgaaccgttcacgttgcgagctgctggcggccgcaaca

SEQ ID NO: 336 - DNA, 317 bp, Artificial Sequence
  Description of Artificial Sequence: Synthetic polynucleotide
tgtagtctcccctcccctagcctgaaacctgcttgctcggggtggagcttcctgctcattcgttctgccacgcccactgctggaacctgaggagccacacacgtgcacctttctactggaccagagattattcggcgggaatcgggtcccctcccccttccttcataactggtgtcgcaacaataaaatttgagccttgatcagagtaactgtcttggctacatttcttcttttgccccgtctagattcctctcttacagctcgagcggccttctcagtcgaaccgttcacgttgcgagctgctggcggccgcaaca

SEQ ID NO: 337 - DNA, 18 bp, Artificial Sequence
  Description of Artificial Sequence: Synthetic oligonucleotide
tggcgcccgaacagggac

SEQ ID NO: 338 - DNA, 33 bp, Artificial Sequence
  Description of Artificial Sequence: Synthetic oligonucleotide
ttttggcgcccgaacagggacctgaagaatggc

SEQ ID NO: 339 - DNA, 2727 bp, Artificial Sequence
  Description of Artificial Sequence: Synthetic polynucleotide
agagagatgctaagaggaacgctgcattggagctccacaggaaaggatcttcgtatcggacatcggagcaacggacaagtacacatgctagcgctagcttaaaatttcagttttgtaaagtgttgctgaggatgcggtaggatacgaattaagcttgaatcagtgctaacccaacgctggttctgcttgggtcagcagcgtgttaatcggaactagaaacggaaacaggcaggttagccgcagctttttaggaagctgcttaggtgaaagaagaaagggtttaaagtcatggatcaggcggtaggccgtagctctccgaagctacatgaggtgtgagaaaagaaagggtttattaaaaggaataggcggattgccccagttaataaaaaatacatcataagggaggaaaatgtcccaaaaagcagagagaaatatctctctgggccttatagcaggagtactctgttcccctttgtgtcttgtctaatgtccggtgcaccaatctgttctcgtgttcgattcatgtatgttcgtgtccagtctgtatgaatgaatgttctatgttttgtgttggataataaagatggtataaaaaactttatctgcaaagccgagagctgccacgtgtttcagccaggaatcagacacgtggcgagagggcccctgctggaaaaactgttcgttttagaaaataagggcgagtgcacagcctctaagtttcagagtaaaaaagctaataaatggttcatgattaatgtgtttgacaatggtaaagtgttttttattttatgattgtagctacaaaaattattattctctgattggtctaaatgtaactgcttcatttggttcttttttattggtaatgtgctctaagtgttttcacaatcagctcataagttgttggttaagattaataattgttacattgctacagatggttagtgttaaatttgataactcaagtttagagtccttccaacacatggcataaggcagcccaagaggctgggtctctaaagatatttctagtttaggtaataattaatatggttcgtatcctaaatagtaaaatttaaaataagatttaaagcaatgtctctttattaaagcattaaagcttgctttaataggtattcataggtattaattgacatccaaacttcgtaatacgatagtaatgcttctaatattgattttaaagataataaattgttttaaacttgggttttgctttcccaaggttataggtattatcctaaccttgcacaaaaaacttaaaaattatggttaaaactgctattgttccattgactgcagcttgcagtttgatttcaaatttaagatctttaattcacctgtatactgtaattaagataattacaagagtaatcatcttatgagagcgctcatacagctcacttcatacaaaactgtgacagagttatctagttatgtttgtctttgtgaatagattagacaaacagtttggttatagttgctgcctggcaggaaactgtagtacaggcaattttttcacaacactaaagttgtgaagaacgttttaactgtaagtcatcttaagaaagagtatcaaaatttagaggcgtagacagttatattgtttctctaaaatcggtccttattacaggagggccaggatgctcagattaaaaagtattttacgtttgagtcaatgcagggctctgggcagccccagagcggcttgtggcctttcttttgttttgcaaacagtgcctgagaaagatttttccctgtgttcaagaaaaattctttttaacagtgttgcagatctattcagatgtttaaaataatgcttaaattcaaagagttttgcttctagtgaactgtaatcactagaaaattttgcctctaggtatggctaatgtaactttacattatgtaagaaaaattttattgtttctgcttctatacaagaagccaagagttttaatctttcagtgtatattgtttcctaagtgaaaagtattttattaactaatgcttcttaaagtttaccttaaatccttgctctcacccaaaagattcagagacaatatccttttattacttagggttttagtttactacaaaagtttctacaaaaaataaagcttttataattgttattaattggtaattaaaaattggttgtgcccaaaacaattctttggccaaaaaaaaaaacattattgtaaagtcatttttctcatcctcccagccaatcgttggcccacgtgggcccaactagcttctgtggggcagagtcttaagacacagtttcccctgttccagcacagatgatctagttgtgtgctgtagatggtgttttaaaatgctgaacaatcaaaccttaatttgtatattaatagtcaatgccatatctctgagctcacaattgcttaaattgttcatccctcagatactattaattctcaaatttacaattgcttatgcatatttctagttaataaataaattatgcacatgtgactcttaataactttacaagccttctagttacaactgctccttaagaaaattgattaaaagtgcaattagtcactgcccctttacagccaagtatttaaaatgttttgtcaactagttattaattcaaaagtttaggtattgtaaaattttaaaactttaacttcttaaaagacaaaaaagagagaaattgtatccccgtgcatgctatttagt

SEQ ID NO: 340 - DNA, 2093 bp, Artificial Sequence
  Description of Artificial Sequence: Synthetic polynucleotide
gcattcccatgcacactattaaagtcttacctttattttcaaaatctaatattttaatgtcaaagagtttaataaatgctttatagtatcttaaagggatctacttattggcttatagattaatcctaaaacagctaccttattaaaaaagggaaaaacaggttttctccacagaacgctgcagaagcatattaataaattcgtgtgacgagctggtaggtaagttgactcatgtcctgattaaattgactaaaaaactaaattaaattcatgttttagatccatccttacttgtcatttttccagtttagactagcttctagccttttaactttatgacaatagtacatcagagactgtatattcagacttagtaaaattagtcatttaatagagtcataatgatttttctcctttcttcagtgtgaccagccattctaactcaatcttagactggtcctaatattcagtccaatgttagagattcctatattctaaattacctagcaagttaattaaagagcaattggtcacttaataccccctgactaacaaatggaagggtccagatccagttctaatttggggtagggactcagtttgtgttttttcacgagatgaagatggagcgcggtggctgccagagagattaattcgtcagatgaacacagattctgactcttctggtaagtatcattctaaagactaaaattccttttgtgcttaaaattcagctgagagcaacagctctcaaaggtgttctccagctactctctgaaccagctcccgacaggaggccggagactagcctcagctttacaatttgcatttgaataaagtacctagacttcccggaaagaagttctgctttcctactttctcactgtctttcaagattttgtctttcaagcaggtaaatcaacattcccgaggcggaccagtagatgtgcatccccgcccccctagagcacacaggtggcagctgttacccccagtctcaggacatttccagcatgtggctttcagtctgagttaaaaatttaggtttacctagagggctagaagagtagatttttctatattaataaagattggtttttattttgatagacaggcttagccccttagctgacctctggcttttcacccttgctgttactgcaaggtgtccttagctcaataggctgtggaaaaaacagggatgaggaggaacgacttccagctcctattttacccacaaatcgtggtgttattaacgacataattcttgcttaggctttgctaattctgaggttgataattctcctttaggagctgcacagcactcagaactgtgcatactggtttgtgattgtacaaattcagtatgggcaccgcttggtgcagagatacttactgcaagggaaggtccggcttgaccatttctgagtttcctgtgagataaacccggtttgaaagaggttggtaccaaattttggttaaaaataaaaaatattctccggctctacctcgcctccccaaaaggtaccaagagccacatgtgtgggttttacccacgggaggaatcgggtccatgtccacccaagccaaggttaaaagcccactcatctacggatgagaaaatcatttgatcacctcagttaagcgttgccttatttaacttaattaataggggggagagagattggagacgtactattgaaagggcaagcccttcactgcctcccacccaaataaaaaggccaattggccttgtactacaagagccggtcactccttctccctgtttcccacctatcttccaaaaatgctaaggaattcaacttagtgttattttcacatcgttcagtcaaacttagccagagttccaaacgccctacttaaaattcaactagaaagttacctaccaagtactaattagcattataaagtcagagtctgcagctccaggcctttcagttgtttactagaaaggacagtcttaagccagatacagtttaccataagaaaagttaaagattcccagtgaagcaagttttttctttagccctagattccaggcagaactattgagcatagataattttcccccc

SEQ ID NO: 341 - DNA, 10 bp, Artificial Sequence
  Description of Artificial Sequence: Synthetic oligonucleotide
agggaggaga

SEQ ID NO: 342 - DNA, 51 bp, Artificial Sequence
  Description of Artificial Sequence: Synthetic oligonucleotide
tcaggccagctttttctttttttttttattttgttaataacagggaggaga

SEQ ID NO: 343 - DNA, 5111 bp, Artificial Sequence
  Description of Artificial Sequence: Synthetic polynucleotide
gaattcgagcttgcatgcctgcaggtcgttacataacttacggtaaatggcccgcctggctgaccgcccaacgacccccgcccattgacgtcaataatgacgtatgttcccatagtaacgccaatagggactttccattgacgtcaatgggtggagtatttacggtaaactgcccacttggcagtacatcaagtgtatcatatgccaagtacgccccctattgacgtcaatgacggtaaatggcccgcctggcattatgcccagtacatgaccttatgggactttcctacttggcagtacatctacgtattagtcatcgctattaccatggtgatgcggttttggcagtacatcaatgggcgtggatagcggtttgactcacggggatttccaagtctccaccccattgacgtcaatgggagtttgttttggcaccaaaatcaacgggactttccaaaatgtcgtaacaactccgccccattgacgcaaatgggcggtaggcgtgtacggtgggaggtctatataagcagagctcgtttagtgaaccgtcagagccttgatcagagtaactgtcttggctacatttcttcttttgccccgtctagattcctctcttacagctcgagcggccttctcagtcgaaccgttcacgttgcgagctgctggcggccgcaacattttggcgcccgaacagggacctgaagaatggcgaacaaacgacccaacacccgtgcgttttattctgtctttttattgccgatcccccggccgctttacttgtacagctcgtccatgccgagagtgatcccggcggcggtcacgaactccagcaggaccatgtgatcgcgcttctcgttggggtctttgctcagggcggactgggtgctcaggtaagtatcaaggttacaagacaggtttaaggagaccaatagaaactgggcttgtcgagacagagaagactcttgcgtttctgataggcacctattggtcttactgacatccactttgcctttctctccacaggtagtggttgtcgggcagcagcacggggccgtcgccgatgggggtgttctgctggtagtggtcggcgagctgcacgctgccgtcctcgatgttgtggcggatcttgaagttcaccttgatgccgttcttctgcttgtcggccatgatatagacgttgtggctgttgtagttgtactccagcttgtgccccaggatgttgccgtcctccttgaagtcgatgcccttcagctcgatgcggttcaccagggtgtcgccctcgaacttcacctcggcgcgggtcttgtagttgccgtcgtccttgaagaagatggtgcgctcctggacgtagccttcgggcatggcggacttgaagaagtcgtgctgcttcatgtggtcggggtagcggctgaagcactgcacgccgtaggtcagggtggtcacgagggtgggccagggcacgggcagcttgccggtggtgcagatgaacttcagggtcagcttgccgtaggtggcatcgccctcgccctcgccggacacgctgaacttgtggccgtttacgtcgccgtccagctcgaccaggatgggcaccaccccggtgaacagctcctcgcccttgctcaccatggtggctttaccaacagtaccggaatgccaagcttgggtcctgtgttctggcggcaaacccgttgcgaaaaagaacgttcacggcgactactgcacttatatacggttctcccccaccctcgggaaaaaggcggagccagtacacgacatcactttcccagtttaccccgcgccaccttctctaggcaccggatcaattgccgacccctccccccaacttctcggggactgtgggcgatgtgcgctctgccctcaggccagctttttctttttttttttattttgttaataacagggaggagatgtagtctcccctcccctagcctgaaacctgcttgctcggggtggagcttcctgctcattcgttctgccacgcccactgctggaacctgaggagccacacacgtgcacctttctactggaccagagattattcggcgggaatcgggtcccctcccccttccttcataactggtgtcgcaacaataaaatttgagccttgatcagagtaactgtcttggctacatttcttcttttgccccgtctagattcctctcttacagctcgagcggccttctcagtcgaaccgttcacgttgcgagctgctggcggccgcaacaggggatccagacatgataagatacattgatgagtttggacaaaccacaactagaatgcagtgaaaaaaatgctttatttgtgaaatttgtgatgctattgctttatttgtaaccattataagctgcaataaacaagttaacaacaacaattgcattcattttatgtttcaggttcagggggaggtgtgggaggttttttcggatcctctagagtcgacctgcaggcatgcaagcttggcgtaatcatggtcatagctgtttcctgtgtgaaattgttatccgctcacaattccacacaacatacgagccggaagcataaagtgtaaagcctggggtgcctaatgagtgagctaactcacattaattgcgttgcgctcactgcccgctttccagtcgggaaacctgtcgtgccagctgcattaatgaatcggccaacgcgcggggagaggcggtttgcgtattgggcgctcttccgcttcctcgctcactgactcgctgcgctcggtcgttcggctgcggcgagcggtatcagctcactcaaaggcggtaatacggttatccacagaatcaggggataacgcaggaaagaacatgtgagcaaaaggccagcaaaaggccaggaaccgtaaaaaggccgcgttgctggcgtttttccataggctccgcccccctgacgagcatcacaaaaatcgacgctcaagtcagaggtggcgaaacccgacaggactataaagataccaggcgtttccccctggaagctccctcgtgcgctctcctgttccgaccctgccgcttaccggatacctgtccgcctttctcccttcgggaagcgtggcgctttctcatagctcacgctgtaggtatctcagttcggtgtaggtcgttcgctccaagctgggctgtgtgcacgaaccccccgttcagcccgaccgctgcgccttatccggtaactatcgtcttgagtccaacccggtaagacacgacttatcgccactggcagcagccactggtaacaggattagcagagcgaggtatgtaggcggtgctacagagttcttgaagtggtggcctaactacggctacactagaaggacagtatttggtatctgcgctctgctgaagccagttaccttcggaaaaagagttggtagctcttgatccggcaaacaaaccaccgctggtagcggtggtttttttgtttgcaagcagcagattacgcgcagaaaaaaaggatctcaagaagatcctttgatcttttctacggggtctgacgctcagtggaacgaaaactcacgttaagggattttggtcatgagattatcaaaaaggatcttcacctagatccttttaaattaaaaatgaagttttaaatcaatctaaagtatatatgagtaaacttggtctgacagttaccaatgcttaatcagtgaggcacctatctcagcgatctgtctatttcgttcatccatagttgcctgactccccgtcgtgtagataactacgatacgggagggcttaccatctggccccagtgctgcaatgataccgcgagacccacgctcaccggctccagatttatcagcaataaaccagccagccggaagggccgagcgcagaagtggtcctgcaactttatccgcctccatccagtctattaattgttgccgggaagctagagtaagtagttcgccagttaatagtttgcgcaacgttgttgccattgctacaggcatcgtggtgtcacgctcgtcgtttggtatggcttcattcagctccggttcccaacgatcaaggcgagttacatgatcccccatgttgtgcaaaaaagcggttagctccttcggtcctccgatcgttgtcagaagtaagttggccgcagtgttatcactcatggttatggcagcactgcataattctcttactgtcatgccatccgtaagatgcttttctgtgactggtgagtactcaaccaagtcattctgagaatagtgtatgcggcgaccgagttgctcttgcccggcgtcaatacgggataataccgcgccacatagcagaactttaaaagtgctcatcattggaaaacgttcttcggggcgaaaactctcaaggatcttaccgctgttgagatccagttcgatgtaacccactcgtgcacccaactgatcttcagcatcttttactttcaccagcgtttctgggtgagcaaaaacaggaaggcaaaatgccgcaaaaaagggaataagggcgacacggaaatgttgaatactcatactcttcctttttcaatattattgaagcatttatcagggttattgtctcatgagcggatacatatttgaatgtatttagaaaaataaacaaataggggttccgcgcacatttccccgaaaagtgccacctgacgtctaagaaaccattattatcatgacattaacctataaaaataggcgtatcacgaggccctttcgtctcgcgcgtttcggtgatgacggtgaaaacctctgacacatgcagctcccggagacggtcacagcttgtctgtaagcggatgccgggagcagacaagcccgtcagggcgcgtcagcgggtgttggcgggtgtcggggctggcttaactatgcggcatcagagcagattgtactgagagtgcaccatatgcggtgtgaaataccgcacagatgcgtaaggagaaaataccgcatcaggcgccattcgccattcaggctgcgcaactgttgggaagggcgatcggtgcgggcctcttcgctattacgccagctggcgaaagggggatgtgctgcaaggcgattaagttgggtaacgccagggttttcccagtcacgacgttgtaaaacgacggccagt

SEQ ID NO: 344 - DNA, 5109 bp, Artificial Sequence
  Description of Artificial Sequence: Synthetic polynucleotide
gaattcgagcttgcatgcctgcaggtcgttacataacttacggtaaatggcccgcctggctgaccgcccaacgacccccgcccattgacgtcaataatgacgtatgttcccatagtaacgccaatagggactttccattgacgtcaatgggtggagtatttacggtaaactgcccacttggcagtacatcaagtgtatcatatgccaagtacgccccctattgacgtcaatgacggtaaatggcccgcctggcattatgcccagtacatgaccttatgggactttcctacttggcagtacatctacgtattagtcatcgctattaccatggtgatgcggttttggcagtacatcaatgggcgtggatagcggtttgactcacggggatttccaagtctccaccccattgacgtcaatgggagtttgttttggcaccaaaatcaacgggactttccaaaatgtcgtaacaactccgccccattgacgcaaatgggcggtaggcgtgtacggtgggaggtctatataagcagagctcgtttagtgaaccgtcagccttgatcagagtaactgtcttggctacatttcttcttttgccccgtctagattcctctcttacagctcgagcggccttctcagtcgaaccgttcacgttgcgagctgctggcggccgcaacattttggcgcccgaacagggacctgaagaatggcgaacaaacgacccaacacccgtgcgttttattctgtctttttattgccgatcccccggccgctttacttgtacagctcgtccatgccgagagtgatcccggcggcggtcacgaactccagcaggaccatgtgatcgcgcttctcgttggggtctttgctcagggcggactgggtgctcaggtaagtatcaaggttacaagacaggtttaaggagaccaatagaaactgggcttgtcgagacagagaagactcttgcgtttctgataggcacctattggtcttactgacatccactttgcctttctctccacaggtagtggttgtcgggcagcagcacggggccgtcgccgatgggggtgttctgctggtagtggtcggcgagctgcacgctgccgtcctcgatgttgtggcggatcttgaagttcaccttgatgccgttcttctgcttgtcggccatgatatagacgttgtggctgttgtagttgtactccagcttgtgccccaggatgttgccgtcctccttgaagtcgatgcccttcagctcgatgcggttcaccagggtgtcgccctcgaacttcacctcggcgcgggtcttgtagttgccgtcgtccttgaagaagatggtgcgctcctggacgtagccttcgggcatggcggacttgaagaagtcgtgctgcttcatgtggtcggggtagcggctgaagcactgcacgccgtaggtcagggtggtcacgagggtgggccagggcacgggcagcttgccggtggtgcagatgaacttcagggtcagcttgccgtaggtggcatcgccctcgccctcgccggacacgctgaacttgtggccgtttacgtcgccgtccagctcgaccaggatgggcaccaccccggtgaacagctcctcgcccttgctcaccatggtggctttaccaacagtaccggaatgccaagcttgggtcctgtgttctggcggcaaacccgttgcgaaaaagaacgttcacggcgactactgcacttatatacggttctcccccaccctcgggaaaaaggcggagccagtacacgacatcactttcccagtttaccccgcgccaccttctctaggcaccggatcaattgccgacccctccccccaacttctcggggactgtgggcgatgtgcgctctgccctcaggccagctttttctttttttttttattttgttaataacagggaggagatgtagtctcccctcccctagcctgaaacctgcttgctcggggtggagcttcctgctcattcgttctgccacgcccactgctggaacctgaggagccacacacgtgcacctttctactggaccagagattattcggcgggaatcgggtcccctcccccttccttcataactggtgtcgcaacaataaaatttgagccttgatcagagtaactgtcttggctacatttcttcttttgccccgtctagattcctctcttacagctcgagcggccttctcagtcgaaccgttcacgttgcgagctgctggcggccgcaacaggggatccagacatgataagatacattgatgagtttggacaaaccacaactagaatgcagtgaaaaaaatgctttatttgtgaaatttgtgatgctattgctttatttgtaaccattataagctgcaataaacaagttaacaacaacaattgcattcattttatgtttcaggttcagggggaggtgtgggaggttttttcggatcctctagagtcgacctgcaggcatgcaagcttggcgtaatcatggtcatagctgtttcctgtgtgaaattgttatccgctcacaattccacacaacatacgagccggaagcataaagtgtaaagcctggggtgcctaatgagtgagctaactcacattaattgcgttgcgctcactgcccgctttccagtcgggaaacctgtcgtgccagctgcattaatgaatcggccaacgcgcggggagaggcggtttgcgtattgggcgctcttccgcttcctcgctcactgactcgctgcgctcggtcgttcggctgcggcgagcggtatcagctcactcaaaggcggtaatacggttatccacagaatcaggggataacgcaggaaagaacatgtgagcaaaaggccagcaaaaggccaggaaccgtaaaaaggccgcgttgctggcgtttttccataggctccgcccccctgacgagcatcacaaaaatcgacgctcaagtcagaggtggcgaaacccgacaggactataaagataccaggcgtttccccctggaagctccctcgtgcgctctcctgttccgaccctgccgcttaccggatacctgtccgcctttctcccttcgggaagcgtggcgctttctcatagctcacgctgtaggtatctcagttcggtgtaggtcgttcgctccaagctgggctgtgtgcacgaaccccccgttcagcccgaccgctgcgccttatccggtaactatcgtcttgagtccaacccggtaagacacgacttatcgccactggcagcagccactggtaacaggattagcagagcgaggtatgtaggcggtgctacagagttcttgaagtggtggcctaactacggctacactagaaggacagtatttggtatctgcgctctgctgaagccagttaccttcggaaaaagagttggtagctcttgatccggcaaacaaaccaccgctggtagcggtggtttttttgtttgcaagcagcagattacgcgcagaaaaaaaggatctcaagaagatcctttgatcttttctacggggtctgacgctcagtggaacgaaaactcacgttaagggattttggtcatgagattatcaaaaaggatcttcacctagatccttttaaattaaaaatgaagttttaaatcaatctaaagtatatatgagtaaacttggtctgacagttaccaatgcttaatcagtgaggcacctatctcagcgatctgtctatttcgttcatccatagttgcctgactccccgtcgtgtagataactacgatacgggagggcttaccatctggccccagtgctgcaatgataccgcgagacccacgctcaccggctccagatttatcagcaataaaccagccagccggaagggccgagcgcagaagtggtcctgcaactttatccgcctccatccagtctattaattgttgccgggaagctagagtaagtagttcgccagttaatagtttgcgcaacgttgttgccattgctacaggcatcgtggtgtcacgctcgtcgtttggtatggcttcattcagctccggttcccaacgatcaaggcgagttacatgatcccccatgttgtgcaaaaaagcggttagctccttcggtcctccgatcgttgtcagaagtaagttggccgcagtgttatcactcatggttatggcagcactgcataattctcttactgtcatgccatccgtaagatgcttttctgtgactggtgagtactcaaccaagtcattctgagaatagtgtatgcggcgaccgagttgctcttgcccggcgtcaatacgggataataccgcgccacatagcagaactttaaaagtgctcatcattggaaaacgttcttcggggcgaaaactctcaaggatcttaccgctgttgagatccagttcgatgtaacccactcgtgcacccaactgatcttcagcatcttttactttcaccagcgtttctgggtgagcaaaaacaggaaggcaaaatgccgcaaaaaagggaataagggcgacacggaaatgttgaatactcatactcttcctttttcaatattattgaagcatttatcagggttattgtctcatgagcggatacatatttgaatgtatttagaaaaataaacaaataggggttccgcgcacatttccccgaaaagtgccacctgacgtctaagaaaccattattatcatgacattaacctataaaaataggcgtatcacgaggccctttcgtctcgcgcgtttcggtgatgacggtgaaaacctctgacacatgcagctcccggagacggtcacagcttgtctgtaagcggatgccgggagcagacaagcccgtcagggcgcgtcagcgggtgttggcgggtgtcggggctggcttaactatgcggcatcagagcagattgtactgagagtgcaccatatgcggtgtgaaataccgcacagatgcgtaaggagaaaataccgcatcaggcgccattcgccattcaggctgcgcaactgttgggaagggcgatcggtgcgggcctcttcgctattacgccagctggcgaaagggggatgtgctgcaaggcgattaagttgggtaacgccagggttttcccagtcacgacgttgtaaaacgacggccagt

SEQ ID NO: 345 - DNA, 5094 bp, Artificial Sequence
  Description of Artificial Sequence: Synthetic polynucleotide
gaattcgagcttgcatgcctgcaggtcgttacataacttacggtaaatggcccgcctggctgaccgcccaacgacccccgcccattgacgtcaataatgacgtatgttcccatagtaacgccaatagggactttccattgacgtcaatgggtggagtatttacggtaaactgcccacttggcagtacatcaagtgtatcatatgccaagtacgccccctattgacgtcaatgacggtaaatggcccgcctggcattatgcccagtacatgaccttatgggactttcctacttggcagtacatctacgtattagtcatcgctattaccatggtgatgcggttttggcagtacatcaatgggcgtggatagcggtttgactcacggggatttccaagtctccaccccattgacgtcaatgggagtttgttttggcaccaaaatcaacgggactttccaaaatgtcgtaacaactccgccccattgacgcaaatgggcggtaggcgtgtacggtgggaggtctatataagcagagctgagccttgatcagagtaactgtcttggctacatttcttcttttgccccgtctagattcctctcttacagctcgagcggccttctcagtcgaaccgttcacgttgcgagctgctggcggccgcaacattttggcgcccgaacagggacctgaagaatggcgaacaaacgacccaacacccgtgcgttttattctgtctttttattgccgatcccccggccgctttacttgtacagctcgtccatgccgagagtgatcccggcggcggtcacgaactccagcaggaccatgtgatcgcgcttctcgttggggtctttgctcagggcggactgggtgctcaggtaagtatcaaggttacaagacaggtttaaggagaccaatagaaactgggcttgtcgagacagagaagactcttgcgtttctgataggcacctattggtcttactgacatccactttgcctttctctccacaggtagtggttgtcgggcagcagcacggggccgtcgccgatgggggtgttctgctggtagtggtcggcgagctgcacgctgccgtcctcgatgttgtggcggatcttgaagttcaccttgatgccgttcttctgcttgtcggccatgatatagacgttgtggctgttgtagttgtactccagcttgtgccccaggatgttgccgtcctccttgaagtcgatgcccttcagctcgatgcggttcaccagggtgtcgccctcgaacttcacctcggcgcgggtcttgtagttgccgtcgtccttgaagaagatggtgcgctcctggacgtagccttcgggcatggcggacttgaagaagtcgtgctgcttcatgtggtcggggtagcggctgaagcactgcacgccgtaggtcagggtggtcacgagggtgggccagggcacgggcagcttgccggtggtgcagatgaacttcagggtcagcttgccgtaggtggcatcgccctcgccctcgccggacacgctgaacttgtggccgtttacgtcgccgtccagctcgaccaggatgggcaccaccccggtgaacagctcctcgcccttgctcaccatggtggctttaccaacagtaccggaatgccaagcttgggtcctgtgttctggcggcaaacccgttgcgaaaaagaacgttcacggcgactactgcacttatatacggttctcccccaccctcgggaaaaaggcggagccagtacacgacatcactttcccagtttaccccgcgccaccttctctaggcaccggatcaattgccgacccctccccccaacttctcggggactgtgggcgatgtgcgctctgccctcaggccagctttttctttttttttttattttgttaataacagggaggagatgtagtctcccctcccctagcctgaaacctgcttgctcggggtggagcttcctgctcattcgttctgccacgcccactgctggaacctgaggagccacacacgtgcacctttctactggaccagagattattcggcgggaatcgggtcccctcccccttccttcataactggtgtcgcaacaataaaatttgagccttgatcagagtaactgtcttggctacatttcttcttttgccccgtctagattcctctcttacagctcgagcggccttctcagtcgaaccgttcacgttgcgagctgctggcggccgcaacaggggatccagacatgataagatacattgatgagtttggacaaaccacaactagaatgcagtgaaaaaaatgctttatttgtgaaatttgtgatgctattgctttatttgtaaccattataagctgcaataaacaagttaacaacaacaattgcattcattttatgtttcaggttcagggggaggtgtgggaggttttttcggatcctctagagtcgacctgcaggcatgcaagcttggcgtaatcatggtcatagctgtttcctgtgtgaaattgttatccgctcacaattccacacaacatacgagccggaagcataaagtgtaaagcctggggtgcctaatgagtgagctaactcacattaattgcgttgcgctcactgcccgctttccagtcgggaaacctgtcgtgccagctgcattaatgaatcggccaacgcgcggggagaggcggtttgcgtattgggcgctcttccgcttcctcgctcactgactcgctgcgctcggtcgttcggctgcggcgagcggtatcagctcactcaaaggcggtaatacggttatccacagaatcaggggataacgcaggaaagaacatgtgagcaaaaggccagcaaaaggccaggaaccgtaaaaaggccgcgttgctggcgtttttccataggctccgcccccctgacgagcatcacaaaaatcgacgctcaagtcagaggtggcgaaacccgacaggactataaagataccaggcgtttccccctggaagctccctcgtgcgctctcctgttccgaccctgccgcttaccggatacctgtccgcctttctcccttcgggaagcgtggcgctttctcatagctcacgctgtaggtatctcagttcggtgtaggtcgttcgctccaagctgggctgtgtgcacgaaccccccgttcagcccgaccgctgcgccttatccggtaactatcgtcttgagtccaacccggtaagacacgacttatcgccactggcagcagccactggtaacaggattagcagagcgaggtatgtaggcggtgctacagagttcttgaagtggtggcctaactacggctacactagaaggacagtatttggtatctgcgctctgctgaagccagttaccttcggaaaaagagttggtagctcttgatccggcaaacaaaccaccgctggtagcggtggtttttttgtttgcaagcagcagattacgcgcagaaaaaaaggatctcaagaagatcctttgatcttttctacggggtctgacgctcagtggaacgaaaactcacgttaagggattttggtcatgagattatcaaaaaggatcttcacctagatccttttaaattaaaaatgaagttttaaatcaatctaaagtatatatgagtaaacttggtctgacagttaccaatgcttaatcagtgaggcacctatctcagcgatctgtctatttcgttcatccatagttgcctgactccccgtcgtgtagataactacgatacgggagggcttaccatctggccccagtgctgcaatgataccgcgagacccacgctcaccggctccagatttatcagcaataaaccagccagccggaagggccgagcgcagaagtggtcctgcaactttatccgcctccatccagtctattaattgttgccgggaagctagagtaagtagttcgccagttaatagtttgcgcaacgttgttgccattgctacaggcatcgtggtgtcacgctcgtcgtttggtatggcttcattcagctccggttcccaacgatcaaggcgagttacatgatcccccatgttgtgcaaaaaagcggttagctccttcggtcctccgatcgttgtcagaagtaagttggccgcagtgttatcactcatggttatggcagcactgcataattctcttactgtcatgccatccgtaagatgcttttctgtgactggtgagtactcaaccaagtcattctgagaatagtgtatgcggcgaccgagttgctcttgcccggcgtcaatacgggataataccgcgccacatagcagaactttaaaagtgctcatcattggaaaacgttcttcggggcgaaaactctcaaggatcttaccgctgttgagatccagttcgatgtaacccactcgtgcacccaactgatcttcagcatcttttactttcaccagcgtttctgggtgagcaaaaacaggaaggcaaaatgccgcaaaaaagggaataagggcgacacggaaatgttgaatactcatactcttcctttttcaatattattgaagcatttatcagggttattgtctcatgagcggatacatatttgaatgtatttagaaaaataaacaaataggggttccgcgcacatttccccgaaaagtgccacctgacgtctaagaaaccattattatcatgacattaacctataaaaataggcgtatcacgaggccctttcgtctcgcgcgtttcggtgatgacggtgaaaacctctgacacatgcagctcccggagacggtcacagcttgtctgtaagcggatgccgggagcagacaagcccgtcagggcgcgtcagcgggtgttggcgggtgtcggggctggcttaactatgcggcatcagagcagattgtactgagagtgcaccatatgcggtgtgaaataccgcacagatgcgtaaggagaaaataccgcatcaggcgccattcgccattcaggctgcgcaactgttgggaagggcgatcggtgcgggcctcttcgctattacgccagctggcgaaagggggatgtgctgcaaggcgattaagttgggtaacgccagggttttcccagtcacgacgttgtaaaacgacggccagt

SEQ ID NO: 346 - DNA, 9929 bp, Artificial Sequence
  Description of Artificial Sequence: Synthetic polynucleotide
gaattcgagcttgcatgcctgcaggtcgttacataacttacggtaaatggcccgcctggctgaccgcccaacgacccccgcccattgacgtcaataatgacgtatgttcccatagtaacgccaatagggactttccattgacgtcaatgggtggagtatttacggtaaactgcccacttggcagtacatcaagtgtatcatatgccaagtacgccccctattgacgtcaatgacggtaaatggcccgcctggcattatgcccagtacatgaccttatgggactttcctacttggcagtacatctacgtattagtcatcgctattaccatggtgatgcggttttggcagtacatcaatgggcgtggatagcggtttgactcacggggatttccaagtctccaccccattgacgtcaatgggagtttgttttggcaccaaaatcaacgggactttccaaaatgtcgtaacaactccgccccattgacgcaaatgggcggtaggcgtgtacggtgggaggtctatataagcagagctcgtttagtgaaccgtcagccttgatcagagtaactgtcttggctacatttcttcttttgccccgtctagattcctctcttacagctcgagcggccttctcagtcgaaccgttcacgttgcgagctgctggcggccgcaacattttggcgcccgaacagggacctgaagaatggcagagagatgctaagaggaacgctgcattggagctccacaggaaaggatcttcgtatcggacatcggagcaacggacaagtacacatgctagcgctagcttaaaatttcagttttgtaaagtgttgctgaggatgcggtaggatacgaattaagcttgaatcagtgctaacccaacgctggttctgcttgggtcagcagcgtgttaatcggaactagaaacggaaacaggcaggttagccgcagctttttaggaagctgcttaggtgaaagaagaaagggtttaaagtcatggatcaggcggtaggccgtagctctccgaagctacatgaggtgtgagaaaagaaagggtttattaaaaggaataggcggattgccccagttaataaaaaatacatcataagggaggaaaatgtcccaaaaagcagagagaaatatctctctgggccttatagcaggagtactctgttcccctttgtgtcttgtctaatgtccggtgcaccaatctgttctcgtgttcgattcatgtatgttcgtgtccagtctgtatgaatgaatgttctatgttttgtgttggataataaagatggtataaaaaactttatctgcaaagccgagagctgccacgtgtttcagccaggaatcagacacgtggcgagagggcccctgctggaaaaactgttcgttttagaaaataagggcgagtgcacagcctctaagtttcagagtaaaaaagctaataaatggttcatgattaatgtgtttgacaatggtaaagtgttttttattttatgattgtagctacaaaaattattattctctgattggtctaaatgtaactgcttcatttggttcttttttattggtaatgtgctctaagtgttttcacaatcagctcataagttgttggttaagattaataattgttacattgctacagatggttagtgttaaatttgataactcaagtttagagtccttccaacacatggcataaggcagcccaagaggctgggtctctaaagatatttctagtttaggtaataattaatatggttcgtatcctaaatagtaaaatttaaaataagatttaaagcaatgtctctttattaaagcattaaagcttgctttaataggtattcataggtattaattgacatccaaacttcgtaatacgatagtaatgcttctaatattgattttaaagataataaattgttttaaacttgggttttgctttcccaaggttataggtattatcctaaccttgcacaaaaaacttaaaaattatggttaaaactgctattgttccattgactgcagcttgcagtttgatttcaaatttaagatctttaattcacctgtatactgtaattaagataattacaagagtaatcatcttatgagagcgctcatacagctcacttcatacaaaactgtgacagagttatctagttatgtttgtctttgtgaatagattagacaaacagtttggttatagttgctgcctggcaggaaactgtagtacaggcaattttttcacaacactaaagttgtgaagaacgttttaactgtaagtcatcttaagaaagagtatcaaaatttagaggcgtagacagttatattgtttctctaaaatcggtccttattacaggagggccaggatgctcagattaaaaagtattttacgtttgagtcaatgcagggctctgggcagccccagagcggcttgtggcctttcttttgttttgcaaacagtgcctgagaaagatttttccctgtgttcaagaaaaattctttttaacagtgttgcagatctattcagatgtttaaaataatgcttaaattcaaagagttttgcttctagtgaactgtaatcactagaaaattttgcctctaggtatggctaatgtaactttacattatgtaagaaaaattttattgtttctgcttctatacaagaagccaagagttttaatctttcagtgtatattgtttcctaagtgaaaagtattttattaactaatgcttcttaaagtttaccttaaatccttgctctcacccaaaagattcagagacaatatccttttattacttagggttttagtttactacaaaagtttctacaaaaaataaagcttttataattgttattaattggtaattaaaaattggttgtgcccaaaacaattctttggccaaaaaaaaaaacattattgtaaagtcatttttctcatcctcccagccaatcgttggcccacgtgggcccaactagcttctgtggggcagagtcttaagacacagtttcccctgttccagcacagatgatctagttgtgtgctgtagatggtgttttaaaatgctgaacaatcaaaccttaatttgtatattaatagtcaatgccatatctctgagctcacaattgcttaaattgttcatccctcagatactattaattctcaaatttacaattgcttatgcatatttctagttaataaataaattatgcacatgtgactcttaataactttacaagccttctagttacaactgctccttaagaaaattgattaaaagtgcaattagtcactgcccctttacagccaagtatttaaaatgttttgtcaactagttattaattcaaaagtttaggtattgtaaaattttaaaactttaacttcttaaaagacaaaaaagagagaaattgtatccccgtgcatgctatttagtgaacaaacgacccaacacccgtgcgttttattctgtctttttattgccgatcccccggccgctttacttgtacagctcgtccatgccgagagtgatcccggcggcggtcacgaactccagcaggaccatgtgatcgcgcttctcgttggggtctttgctcagggcggactgggtgctcaggtaagtatcaaggttacaagacaggtttaaggagaccaatagaaactgggcttgtcgagacagagaagactcttgcgtttctgataggcacctattggtcttactgacatccactttgcctttctctccacaggtagtggttgtcgggcagcagcacggggccgtcgccgatgggggtgttctgctggtagtggtcggcgagctgcacgctgccgtcctcgatgttgtggcggatcttgaagttcaccttgatgccgttcttctgcttgtcggccatgatatagacgttgtggctgttgtagttgtactccagcttgtgccccaggatgttgccgtcctccttgaagtcgatgcccttcagctcgatgcggttcaccagggtgtcgccctcgaacttcacctcggcgcgggtcttgtagttgccgtcgtccttgaagaagatggtgcgctcctggacgtagccttcgggcatggcggacttgaagaagtcgtgctgcttcatgtggtcggggtagcggctgaagcactgcacgccgtaggtcagggtggtcacgagggtgggccagggcacgggcagcttgccggtggtgcagatgaacttcagggtcagcttgccgtaggtggcatcgccctcgccctcgccggacacgctgaacttgtggccgtttacgtcgccgtccagctcgaccaggatgggcaccaccccggtgaacagctcctcgcccttgctcaccatggtggctttaccaacagtaccggaatgccaagcttgggtcctgtgttctggcggcaaacccgttgcgaaaaagaacgttcacggcgactactgcacttatatacggttctcccccaccctcgggaaaaaggcggagccagtacacgacatcactttcccagtttaccccgcgccaccttctctaggcaccggatcaattgccgacccctccccccaacttctcggggactgtgggcgatgtgcgctctgcccgcattcccatgcacactattaaagtcttacctttattttcaaaatctaatattttaatgtcaaagagtttaataaatgctttatagtatcttaaagggatctacttattggcttatagattaatcctaaaacagctaccttattaaaaaagggaaaaacaggttttctccacagaacgctgcagaagcatattaataaattcgtgtgacgagctggtaggtaagttgactcatgtcctgattaaattgactaaaaaactaaattaaattcatgttttagatccatccttacttgtcatttttccagtttagactagcttctagccttttaactttatgacaatagtacatcagagactgtatattcagacttagtaaaattagtcatttaatagagtcataatgatttttctcctttcttcagtgtgaccagccattctaactcaatcttagactggtcctaatattcagtccaatgttagagattcctatattctaaattacctagcaagttaattaaagagcaattggtcacttaataccccctgactaacaaatggaagggtccagatccagttctaatttggggtagggactcagtttgtgttttttcacgagatgaagatggagcgcggtggctgccagagagattaattcgtcagatgaacacagattctgactcttctggtaagtatcattctaaagactaaaattccttttgtgcttaaaattcagctgagagcaacagctctcaaaggtgttctccagctactctctgaaccagctcccgacaggaggccggagactagcctcagctttacaatttgcatttgaataaagtacctagacttcccggaaagaagttctgctttcctactttctcactgtctttcaagattttgtctttcaagcaggtaaatcaacattcccgaggcggaccagtagatgtgcatccccgcccccctagagcacacaggtggcagctgttacccccagtctcaggacatttccagcatgtggctttcagtctgagttaaaaatttaggtttacctagagggctagaagagtagatttttctatattaataaagattggtttttattttgatagacaggcttagccccttagctgacctctggcttttcacccttgctgttactgcaaggtgtccttagctcaataggctgtggaaaaaacagggatgaggaggaacgacttccagctcctattttacccacaaatcgtggtgttattaacgacataattcttgcttaggctttgctaattctgaggttgataattctcctttaggagctgcacagcactcagaactgtgcatactggtttgtgattgtacaaattcagtatgggcaccgcttggtgcagagatacttactgcaagggaaggtccggcttgaccatttctgagtttcctgtgagataaacccggtttgaaagaggttggtaccaaattttggttaaaaataaaaaatattctccggctctacctcgcctccccaaaaggtaccaagagccacatgtgtgggttttacccacgggaggaatcgggtccatgtccacccaagccaaggttaaaagcccactcatctacggatgagaaaatcatttgatcacctcagttaagcgttgccttatttaacttaattaataggggggagagagattggagacgtactattgaaagggcaagcccttcactgcctcccacccaaataaaaaggccaattggccttgtactacaagagccggtcactccttctccctgtttcccacctatcttccaaaaatgctaaggaattcaacttagtgttattttcacatcgttcagtcaaacttagccagagttccaaacgccctacttaaaattcaactagaaagttacctaccaagtactaattagcattataaagtcagagtctgcagctccaggcctttcagttgtttactagaaaggacagtcttaagccagatacagtttaccataagaaaagttaaagattcccagtgaagcaagttttttctttagccctagattccaggcagaactattgagcatagataattttcccccctcaggccagctttttctttttttttttattttgttaataacagggaggagatgtagtctcccctcccctagcctgaaacctgcttgctcggggtggagcttcctgctcattcgttctgccacgcccactgctggaacctgaggagccacacacgtgcacctttctactggaccagagattattcggcgggaatcgggtcccctcccccttccttcataactggtgtcgcaacaataaaatttgagccttgatcagagtaactgtcttggctacatttcttcttttgccccgtctagattcctctcttacagctcgagcggccttctcagtcgaaccgttcacgttgcgagctgctggcggccgcaacaggggatccagacatgataagatacattgatgagtttggacaaaccacaactagaatgcagtgaaaaaaatgctttatttgtgaaatttgtgatgctattgctttatttgtaaccattataagctgcaataaacaagttaacaacaacaattgcattcattttatgtttcaggttcagggggaggtgtgggaggttttttcggatcctctagagtcgacctgcaggcatgcaagcttggcgtaatcatggtcatagctgtttcctgtgtgaaattgttatccgctcacaattccacacaacatacgagccggaagcataaagtgtaaagcctggggtgcctaatgagtgagctaactcacattaattgcgttgcgctcactgcccgctttccagtcgggaaacctgtcgtgccagctgcattaatgaatcggccaacgcgcggggagaggcggtttgcgtattgggcgctcttccgcttcctcgctcactgactcgctgcgctcggtcgttcggctgcggcgagcggtatcagctcactcaaaggcggtaatacggttatccacagaatcaggggataacgcaggaaagaacatgtgagcaaaaggccagcaaaaggccaggaaccgtaaaaaggccgcgttgctggcgtttttccataggctccgcccccctgacgagcatcacaaaaatcgacgctcaagtcagaggtggcgaaacccgacaggactataaagataccaggcgtttccccctggaagctccctcgtgcgctctcctgttccgaccctgccgcttaccggatacctgtccgcctttctcccttcgggaagcgtggcgctttctcatagctcacgctgtaggtatctcagttcggtgtaggtcgttcgctccaagctgggctgtgtgcacgaaccccccgttcagcccgaccgctgcgccttatccggtaactatcgtcttgagtccaacccggtaagacacgacttatcgccactggcagcagccactggtaacaggattagcagagcgaggtatgtaggcggtgctacagagttcttgaagtggtggcctaactacggctacactagaaggacagtatttggtatctgcgctctgctgaagccagttaccttcggaaaaagagttggtagctcttgatccggcaaacaaaccaccgctggtagcggtggtttttttgtttgcaagcagcagattacgcgcagaaaaaaaggatctcaagaagatcctttgatcttttctacggggtctgacgctcagtggaacgaaaactcacgttaagggattttggtcatgagattatcaaaaaggatcttcacctagatccttttaaattaaaaatgaagttttaaatcaatctaaagtatatatgagtaaacttggtctgacagttaccaatgcttaatcagtgaggcacctatctcagcgatctgtctatttcgttcatccatagttgcctgactccccgtcgtgtagataactacgatacgggagggcttaccatctggccccagtgctgcaatgataccgcgagacccacgctcaccggctccagatttatcagcaataaaccagccagccggaagggccgagcgcagaagtggtcctgcaactttatccgcctccatccagtctattaattgttgccgggaagctagagtaagtagttcgccagttaatagtttgcgcaacgttgttgccattgctacaggcatcgtggtgtcacgctcgtcgtttggtatggcttcattcagctccggttcccaacgatcaaggcgagttacatgatcccccatgttgtgcaaaaaagcggttagctccttcggtcctccgatcgttgtcagaagtaagttggccgcagtgttatcactcatggttatggcagcactgcataattctcttactgtcatgccatccgtaagatgcttttctgtgactggtgagtactcaaccaagtcattctgagaatagtgtatgcggcgaccgagttgctcttgcccggcgtcaatacgggataataccgcgccacatagcagaactttaaaagtgctcatcattggaaaacgttcttcggggcgaaaactctcaaggatcttaccgctgttgagatccagttcgatgtaacccactcgtgcacccaactgatcttcagcatcttttactttcaccagcgtttctgggtgagcaaaaacaggaaggcaaaatgccgcaaaaaagggaataagggcgacacggaaatgttgaatactcatactcttcctttttcaatattattgaagcatttatcagggttattgtctcatgagcggatacatatttgaatgtatttagaaaaataaacaaataggggttccgcgcacatttccccgaaaagtgccacctgacgtctaagaaaccattattatcatgacattaacctataaaaataggcgtatcacgaggccctttcgtctcgcgcgtttcggtgatgacggtgaaaacctctgacacatgcagctcccggagacggtcacagcttgtctgtaagcggatgccgggagcagacaagcccgtcagggcgcgtcagcgggtgttggcgggtgtcggggctggcttaactatgcggcatcagagcagattgtactgagagtgcaccatatgcggtgtgaaataccgcacagatgcgtaaggagaaaataccgcatcaggcgccattcgccattcaggctgcgcaactgttgggaagggcgatcggtgcgggcctcttcgctattacgccagctggcgaaagggggatgtgctgcaaggcgattaagttgggtaacgccagggttttcccagtcacgacgttgtaaaacgacggccagt

SEQ ID NO: 347 - DNA, 9914 bp, Artificial Sequence
  Description of Artificial Sequence: Synthetic polynucleotide
gaattcgagcttgcatgcctgcaggtcgttacataacttacggtaaatggcccgcctggctgaccgcccaacgacccccgcccattgacgtcaataatgacgtatgttcccatagtaacgccaatagggactttccattgacgtcaatgggtggagtatttacggtaaactgcccacttggcagtacatcaagtgtatcatatgccaagtacgccccctattgacgtcaatgacggtaaatggcccgcctggcattatgcccagtacatgaccttatgggactttcctacttggcagtacatctacgtattagtcatcgctattaccatggtgatgcggttttggcagtacatcaatgggcgtggatagcggtttgactcacggggatttccaagtctccaccccattgacgtcaatgggagtttgttttggcaccaaaatcaacgggactttccaaaatgtcgtaacaactccgccccattgacgcaaatgggcggtaggcgtgtacggtgggaggtctatataagcagagctgagccttgatcagagtaactgtcttggctacatttcttcttttgccccgtctagattcctctcttacagctcgagcggccttctcagtcgaaccgttcacgttgcgagctgctggcggccgcaacattttggcgcccgaacagggacctgaagaatggcagagagatgctaagaggaacgctgcattggagctccacaggaaaggatcttcgtatcggacatcggagcaacggacaagtacacatgctagcgctagcttaaaatttcagttttgtaaagtgttgctgaggatgcggtaggatacgaattaagcttgaatcagtgctaacccaacgctggttctgcttgggtcagcagcgtgttaatcggaactagaaacggaaacaggcaggttagccgcagctttttaggaagctgcttaggtgaaagaagaaagggtttaaagtcatggatcaggcggtaggccgtagctctccgaagctacatgaggtgtgagaaaagaaagggtttattaaaaggaataggcggattgccccagttaataaaaaatacatcataagggaggaaaatgtcccaaaaagcagagagaaatatctctctgggccttatagcaggagtactctgttcccctttgtgtcttgtctaatgtccggtgcaccaatctgttctcgtgttcgattcatgtatgttcgtgtccagtctgtatgaatgaatgttctatgttttgtgttggataataaagatggtataaaaaactttatctgcaaagccgagagctgccacgtgtttcagccaggaatcagacacgtggcgagagggcccctgctggaaaaactgttcgttttagaaaataagggcgagtgcacagcctctaagtttcagagtaaaaaagctaataaatggttcatgattaatgtgtttgacaatggtaaagtgttttttattttatgattgtagctacaaaaattattattctctgattggtctaaatgtaactgcttcatttggttcttttttattggtaatgtgctctaagtgttttcacaatcagctcataagttgttggttaagattaataattgttacattgctacagatggttagtgttaaatttgataactcaagtttagagtccttccaacacatggcataaggcagcccaagaggctgggtctctaaagatatttctagtttaggtaataattaatatggttcgtatcctaaatagtaaaatttaaaataagatttaaagcaatgtctctttattaaagcattaaagcttgctttaataggtattcataggtattaattgacatccaaacttcgtaatacgatagtaatgcttctaatattgattttaaagataataaattgttttaaacttgggttttgctttcccaaggttataggtattatcctaaccttgcacaaaaaacttaaaaattatggttaaaactgctattgttccattgactgcagcttgcagtttgatttcaaatttaagatctttaattcacctgtatactgtaattaagataattacaagagtaatcatcttatgagagcgctcatacagctcacttcatacaaaactgtgacagagttatctagttatgtttgtctttgtgaatagattagacaaacagtttggttatagttgctgcctggcaggaaactgtagtacaggcaattttttcacaacactaaagttgtgaagaacgttttaactgtaagtcatcttaagaaagagtatcaaaatttagaggcgtagacagttatattgtttctctaaaatcggtccttattacaggagggccaggatgctcagattaaaaagtattttacgtttgagtcaatgcagggctctgggcagccccagagcggcttgtggcctttcttttgttttgcaaacagtgcctgagaaagatttttccctgtgttcaagaaaaattctttttaacagtgttgcagatctattcagatgtttaaaataatgcttaaattcaaagagttttgcttctagtgaactgtaatcactagaaaattttgcctctaggtatggctaatgtaactttacattatgtaagaaaaattttattgtttctgcttctatacaagaagccaagagttttaatctttcagtgtatattgtttcctaagtgaaaagtattttattaactaatgcttcttaaagtttaccttaaatccttgctctcacccaaaagattcagagacaatatccttttattacttagggttttagtttactacaaaagtttctacaaaaaataaagcttttataattgttattaattggtaattaaaaattggttgtgcccaaaacaattctttggccaaaaaaaaaaacattattgtaaagtcatttttctcatcctcccagccaatcgttggcccacgtgggcccaactagcttctgtggggcagagtcttaagacacagtttcccctgttccagcacagatgatctagttgtgtgctgtagatggtgttttaaaatgctgaacaatcaaaccttaatttgtatattaatagtcaatgccatatctctgagctcacaattgcttaaattgttcatccctcagatactattaattctcaaatttacaattgcttatgcatatttctagttaataaataaattatgcacatgtgactcttaataactttacaagccttctagttacaactgctccttaagaaaattgattaaaagtgcaattagtcactgcccctttacagccaagtatttaaaatgttttgtcaactagttattaattcaaaagtttaggtattgtaaaattttaaaactttaacttcttaaaagacaaaaaagagagaaattgtatccccgtgcatgctatttagtgaacaaacgacccaacacccgtgcgttttattctgtctttttattgccgatcccccggccgctttacttgtacagctcgtccatgccgagagtgatcccggcggcggtcacgaactccagcaggaccatgtgatcgcgcttctcgttggggtctttgctcagggcggactgggtgctcaggtaagtatcaaggttacaagacaggtttaaggagaccaatagaaactgggcttgtcgagacagagaagactcttgcgtttctgataggcacctattggtcttactgacatccactttgcctttctctccacaggtagtggttgtcgggcagcagcacggggccgtcgccgatgggggtgttctgctggtagtggtcggcgagctgcacgctgccgtcctcgatgttgtggcggatcttgaagttcaccttgatgccgttcttctgcttgtcggccatgatatagacgttgtggctgttgtagttgtactccagcttgtgccccaggatgttgccgtcctccttgaagtcgatgcccttcagctcgatgcggttcaccagggtgtcgccctcgaacttcacctcggcgcgggtcttgtagttgccgtcgtccttgaagaagatggtgcgctcctggacgtagccttcgggcatggcggacttgaagaagtcgtgctgcttcatgtggtcggggtagcggctgaagcactgcacgccgtaggtcagggtggtcacgagggtgggccagggcacgggcagcttgccggtggtgcagatgaacttcagggtcagcttgccgtaggtggcatcgccctcgccctcgccggacacgctgaacttgtggccgtttacgtcgccgtccagctcgaccaggatgggcaccaccccggtgaacagctcctcgcccttgctcaccatggtggctttaccaacagtaccggaatgccaagcttgggtcctgtgttctggcggcaaacccgttgcgaaaaagaacgttcacggcgactactgcacttatatacggttctcccccaccctcgggaaaaaggcggagccagtacacgacatcactttcccagtttaccccgcgccaccttctctaggcaccggatcaattgccgacccctccccccaacttctcggggactgtgggcgatgtgcgctctgcccgcattcccatgcacactattaaagtcttacctttattttcaaaatctaatattttaatgtcaaagagtttaataaatgctttatagtatcttaaagggatctacttattggcttatagattaatcctaaaacagctaccttattaaaaaagggaaaaacaggttttctccacagaacgctgcagaagcatattaataaattcgtgtgacgagctggtaggtaagttgactcatgtcctgattaaattgactaaaaaactaaattaaattcatgttttagatccatccttacttgtcatttttccagtttagactagcttctagccttttaactttatgacaatagtacatcagagactgtatattcagacttagtaaaattagtcatttaatagagtcataatgatttttctcctttcttcagtgtgaccagccattctaactcaatcttagactggtcctaatattcagtccaatgttagagattcctatattctaaattacctagcaagttaattaaagagcaattggtcacttaataccccctgactaacaaatggaagggtccagatccagttctaatttggggtagggactcagtttgtgttttttcacgagatgaagatggagcgcggtggctgccagagagattaattcgtcagatgaacacagattctgactcttctggtaagtatcattctaaagactaaaattccttttgtgcttaaaattcagctgagagcaacagctctcaaaggtgttctccagctactctctgaaccagctcccgacaggaggccggagactagcctcagctttacaatttgcatttgaataaagtacctagacttcccggaaagaagttctgctttcctactttctcactgtctttcaagattttgtctttcaagcaggtaaatcaacattcccgaggcggaccagtagatgtgcatccccgcccccctagagcacacaggtggcagctgttacccccagtctcaggacatttccagcatgtggctttcagtctgagttaaaaatttaggtttacctagagggctagaagagtagatttttctatattaataaagattggtttttattttgatagacaggcttagccccttagctgacctctggcttttcacccttgctgttactgcaaggtgtccttagctcaataggctgtggaaaaaacagggatgaggaggaacgacttccagctcctattttacccacaaatcgtggtgttattaacgacataattcttgcttaggctttgctaattctgaggttgataattctcctttaggagctgcacagcactcagaactgtgcatactggtttgtgattgtacaaattcagtatgggcaccgcttggtgcagagatacttactgcaagggaaggtccggcttgaccatttctgagtttcctgtgagataaacccggtttgaaagaggttggtaccaaattttggttaaaaataaaaaatattctccggctctacctcgcctccccaaaaggtaccaagagccacatgtgtgggttttacccacgggaggaatcgggtccatgtccacccaagccaaggttaaaagcccactcatctacggatgagaaaatcatttgatcacctcagttaagcgttgccttatttaacttaattaataggggggagagagattggagacgtactattgaaagggcaagcccttcactgcctcccacccaaataaaaaggccaattggccttgtactacaagagccggtcactccttctccctgtttcccacctatcttccaaaaatgctaaggaattcaacttagtgttattttcacatcgttcagtcaaacttagccagagttccaaacgccctacttaaaattcaactagaaagttacctaccaagtactaattagcattataaagtcagagtctgcagctccaggcctttcagttgtttactagaaaggacagtcttaagccagatacagtttaccataagaaaagttaaagattcccagtgaagcaagttttttctttagccctagattccaggcagaactattgagcatagataattttcccccctcaggccagctttttctttttttttttattttgttaataacagggaggagatgtagtctcccctcccctagcctgaaacctgcttgctcggggtggagcttcctgctcattcgttctgccacgcccactgctggaacctgaggagccacacacgtgcacctttctactggaccagagattattcggcgggaatcgggtcccctcccccttccttcataactggtgtcgcaacaataaaatttgagccttgatcagagtaactgtcttggctacatttcttcttttgccccgtctagattcctctcttacagctcgagcggccttctcagtcgaaccgttcacgttgcgagctgctggcggccgcaacaggggatccagacatgataagatacattgatgagtttggacaaaccacaactagaatgcagtgaaaaaaatgctttatttgtgaaatttgtgatgctattgctttatttgtaaccattataagctgcaataaacaagttaacaacaacaattgcattcattttatgtttcaggttcagggggaggtgtgggaggttttttcggatcctctagagtcgacctgcaggcatgcaagcttggcgtaatcatggtcatagctgtttcctgtgtgaaattgttatccgctcacaattccacacaacatacgagccggaagcataaagtgtaaagcctggggtgcctaatgagtgagctaactcacattaattgcgttgcgctcactgcccgctttccagtcgggaaacctgtcgtgccagctgcattaatgaatcggccaacgcgcggggagaggcggtttgcgtattgggcgctcttccgcttcctcgctcactgactcgctgcgctcggtcgttcggctgcggcgagcggtatcagctcactcaaaggcggtaatacggttatccacagaatcaggggataacgcaggaaagaacatgtgagcaaaaggccagcaaaaggccaggaaccgtaaaaaggccgcgttgctggcgtttttccataggctccgcccccctgacgagcatcacaaaaatcgacgctcaagtcagaggtggcgaaacccgacaggactataaagataccaggcgtttccccctggaagctccctcgtgcgctctcctgttccgaccctgccgcttaccggatacctgtccgcctttctcccttcgggaagcgtggcgctttctcatagctcacgctgtaggtatctcagttcggtgtaggtcgttcgctccaagctgggctgtgtgcacgaaccccccgttcagcccgaccgctgcgccttatccggtaactatcgtcttgagtccaacccggtaagacacgacttatcgccactggcagcagccactggtaacaggattagcagagcgaggtatgtaggcggtgctacagagttcttgaagtggtggcctaactacggctacactagaaggacagtatttggtatctgcgctctgctgaagccagttaccttcggaaaaagagttggtagctcttgatccggcaaacaaaccaccgctggtagcggtggtttttttgtttgcaagcagcagattacgcgcagaaaaaaaggatctcaagaagatcctttgatcttttctacggggtctgacgctcagtggaacgaaaactcacgttaagggattttggtcatgagattatcaaaaaggatcttcacctagatccttttaaattaaaaatgaagttttaaatcaatctaaagtatatatgagtaaacttggtctgacagttaccaatgcttaatcagtgaggcacctatctcagcgatctgtctatttcgttcatccatagttgcctgactccccgtcgtgtagataactacgatacgggagggcttaccatctggccccagtgctgcaatgataccgcgagacccacgctcaccggctccagatttatcagcaataaaccagccagccggaagggccgagcgcagaagtggtcctgcaactttatccgcctccatccagtctattaattgttgccgggaagctagagtaagtagttcgccagttaatagtttgcgcaacgttgttgccattgctacaggcatcgtggtgtcacgctcgtcgtttggtatggcttcattcagctccggttcccaacgatcaaggcgagttacatgatcccccatgttgtgcaaaaaagcggttagctccttcggtcctccgatcgttgtcagaagtaagttggccgcagtgttatcactcatggttatggcagcactgcataattctcttactgtcatgccatccgtaagatgcttttctgtgactggtgagtactcaaccaagtcattctgagaatagtgtatgcggcgaccgagttgctcttgcccggcgtcaatacgggataataccgcgccacatagcagaactttaaaagtgctcatcattggaaaacgttcttcggggcgaaaactctcaaggatcttaccgctgttgagatccagttcgatgtaacccactcgtgcacccaactgatcttcagcatcttttactttcaccagcgtttctgggtgagcaaaaacaggaaggcaaaatgccgcaaaaaagggaataagggcgacacggaaatgttgaatactcatactcttcctttttcaatattattgaagcatttatcagggttattgtctcatgagcggatacatatttgaatgtatttagaaaaataaacaaataggggttccgcgcacatttccccgaaaagtgccacctgacgtctaagaaaccattattatcatgacattaacctataaaaataggcgtatcacgaggccctttcgtctcgcgcgtttcggtgatgacggtgaaaacctctgacacatgcagctcccggagacggtcacagcttgtctgtaagcggatgccgggagcagacaagcccgtcagggcgcgtcagcgggtgttggcgggtgtcggggctggcttaactatgcggcatcagagcagattgtactgagagtgcaccatatgcggtgtgaaataccgcacagatgcgtaaggagaaaataccgcatcaggcgccattcgccattcaggctgcgcaactgttgggaagggcgatcggtgcgggcctcttcgctattacgccagctggcgaaagggggatgtgctgcaaggcgattaagttgggtaacgccagggttttcccagtcacgacgttgtaaaacgacggccagt

SEQ ID NO: 348 - DNA, 214 bp, Artificial Sequence
  Description of Artificial Sequence: Synthetic polynucleotide
tgttgggagccgcgcccacattcgccgttacaagatggcgctgacagctgtgttctaagtggtaaacaaataatctgcgcatgtgccgagggtggttcttcactctatgtgctctgccttccccgtgacgtcaactcggccgatgggctgcagccaatcagggagtgacacgtcctaggcgaaggagaattctctttaatagggacggggtttt

SEQ ID NO: 349 - DNA, 18 bp, Artificial Sequence
  Description of Artificial Sequence: Synthetic oligonucleotide
gttttctctctctcttgc

SEQ ID NO: 350 - DNA, 31 bp, Artificial Sequence
  Description of Artificial Sequence: Synthetic oligonucleotide
gggacggggtttcgttttctctctctcttgc

SEQ ID NO: 351 - DNA, 122 bp, Artificial Sequence
  Description of Artificial Sequence: Synthetic polynucleotide
ttctcgctcgctcttgcttcttgcactctggctcctgaagatgtaagcaataaagttttgccgcagaagattctggtctgtggtgttcttcctggccgggcgtgagaacgcgtctaataaca

SEQ ID NO: 352 - DNA, 354 bp, Artificial Sequence
  Description of Artificial Sequence: Synthetic polynucleotide
tgttgggagccgcgcccacattcgccgttacaagatggcgctgacagctgtgttctaagtggtaaacaaataatctgcgcatgtgccgagggtggttcttcactctatgtgctctgccttccccgtgacgtcaactcggccgatgggctgcagccaatcagggagtgacacgtcctaggcgaaggagaattctctttaatagggacggggttttgttttctctctctcttgcttctcgctcgctcttgcttcttgcactctggctcctgaagatgtaagcaataaagttttgccgcagaagattctggtctgtggtgttcttcctggccgggcgtgagaacgcgtctaataaca

SEQ ID NO: 353 - DNA, 17 bp, Artificial Sequence
  Description of Artificial Sequence: Synthetic oligonucleotide
ggtgccgaattccggga

SEQ ID NO: 354 - DNA, 1794 bp, Artificial Sequence
  Description of Artificial Sequence: Synthetic polynucleotide
atgaattcagaacttttcagctggggaacgagagtaccagtgagtacagctttacgaggtaagtctgatcttgaactttctaaggaaattcaagacagtctatcagaagtaaagtggaatatgtttggccttgaattttttctggtgttaggagcccttttgttccttttcacatgttatcaagtgattaagatagggctgaaaattctagaggaaattcaggacaagctatcagaagtaaagcggggagagagagtaggagcaaagagaaaatatggtacacaaaataagtatacaggcctttccaagggtcttgaacccgaggaaaagttaaggttaggtaggaatacctggagagagattagaagaaaaagaggaaaaagggaaaagaagaaagatcaattagcggaggtctctaggagatactcgtcactagatgagctcaggaagccagctcttagtagttctgaagcagatgaagaattctcctctgaggaaacagactgggaggaagaagcagcccattaccagccagctaattggtcaagaaaaaagccaaaagcggctggcgaaggccagtttgctgattggcctcagggcagtcggcttcaaggtccgccctatgcggagtccccgccctgcgtagtgcgtcagcaatgcgcagagaggcagtgcgcagagaggcagtgcgcagactcattcattcccagagaggaacaaaggaaaatacaacaggcatttccggtctttgaaggagccgagggtgggcgtgtccacgctccggtagaatacttacaaattaaagaaattgccgagtcggtccgtaaatatggaaccaatgctaattttaccttggtgcagttagacaggctcgccggcatggcactaactcctgctgactggcaaacggttgtaaaagccgctctccctagtatgggcaaatatatggaatggagagcgctttggcacgaagctgcacaagcgcaggcccgagcaaacgcagctgctttgactccagagcagagagattggacttttgacttgttaacgggtcagggagcttattctgctgatcagacaaactaccattggggagcttatgcccagatttcttccacggctattagggcctggaaggcgctctctcgagcaggtgaaaccactggtcagttaacaaagataatccagggacctcaggaatccttctcagattttgtggccagaatgacagaggcagcagagcgtatttttggagagtcagagcaagctgcgcctctgatagaacagctaatctatgagcaagccacaaaggagtgccgagcggccatagccccaagaaagaacaaaggcttacaagactggctcagggtctgtcgagagcttgggggacctctcagcaatgcaggtttagcggctgccatccttcaatcccaaaaccgctccatgggcagaaataatcagaggacatgttttaactgcggaaagcctgggcattttaagaaagattgcagagctccagataaacagggagggactctcactctttgctctaagtgtggcaagggttatcatagagctgaccagtgtcgctctgtgagggatataaagggcagagtccttcccccacctgatagtcaatcagctgatgtgccaaaaaacgggtcatcgggccctcggtcccagggccctcaaagatatgggaaccggtttgtcaggacccaggaagcagtcagagaggcgacccaggaagacccacaagggtggacctgcgtgccgcctccgacttcctactaa

SEQ ID NO: 355 - DNA, 778 bp, Artificial Sequence
  Description of Artificial Sequence: Synthetic polynucleotide
aatgcctcaaatgagtattcagccggtgccggtggagcctataccatccttgcccccgggaaccatgggccttattctcggccggggttcactcaccttgcagggcttagtagtccaccctggagttatggattgtcaacattcccctgaaatacaggtcctgtgctcaagccctaaaggcgttttttctattagtaaaggagataggatagctcagctgctgctcctccctgataataccagggagaaatttgcaggacctgagataaagaaaatgggctcctcaggaaatgattctgcctatttggttgtatctttaaatgatagacctaagctccgccttaagattaacggaaaagagtttgaaggcatccttgataccggagcagataaaagtataatttctacacattggtggcccaaagcatggcccaccacagagtcatctcattcattacagggcctaggatatcaatcatgtcccactataagctccattgccttgacgtgggaatcctctgaaggacagcaagggaaattcataccttatgtgctcccactcccggttaacctctggggaagggatattatgcagcatttgggccttattttgtccaatgaaaacgccccatcaggagggtattcagctaaagcaaaaaatatcatggcaaagatgggttataaagaaggaaaagggttaggacatcaagaacagggaaggatagagcccatctcacctaatggaaaccaagacagacagggtctgggttttccttag

SEQ ID NO: 356 - DNA, 2688 bp, Artificial Sequence
  Description of Artificial Sequence: Synthetic polynucleotide
tggaaaccaagacagacagggtctgggttttccttagcggccattggggcagcacgacccataccatggaaaacaggggacccagtgtgggttcctcaatggcacctatcctctgaaaaactagaagctgtgattcaactggtagaggaacaattaaaactaggccatattgaaccctctacctcaccttggaatactccaatttttgtaattaagaaaaagtcaggaaagtggagactgctccatgacctcagagccattaatgagcaaatgaacttatttggcccagtacagaggggtctccctgtactttccgccttaccacgtggctggaatttaattattatagatattaaagattgtttcttttctatacctttgtgtccaagggataggcccagatttgcctttaccatcccctctattaatcacatggaacctgataagaggtatcaatggaaggtcttaccacagggaatgtccaatagtcctacaatgtgccaactttatgtgcaagaagctcttttgccagtgagggaacaattcccctctttaattttgctcctttacatggatgacatcctcctgtgccataaagaccttaccatgctacaaaaggcatatccttttctacttaaaactttaagtcagtggggtttacagatagccacagaaaaggtccaaatttctgatacaggacaattcttgggctctgtggtgtccccagataagattgtgccccaaaaggtagagataagaagagatcacctccataccttaaatgattttcaaaagctgttgggagatattaattggctcagaccttttttaaagattccttccgctgagttaaggcctttgtttagtattttagaaggagatcctcatatctcctcccctaggactcttactctagctgctaaccaggccttacaaaaggtggaaaaagccttacagaatgcacaattacaacgtattgaggattcgcagcctttcagtttgtgtgtctttaagacagcacaattgccaactgcagttttgtggcagaatgggccattgttgtggatccatccaaacgtatccccagctaaaataatagattggtatcctgatgcaattgcacagcttgcccttaaaggtctaaaagcagcaatcacccactttgggcaaagtccatatcttttaattgtaccttataccgctgcacaggttcaaaccttggcagccacatctaatgattgggcagttttagttacctccttttcaggaaaaatagataaccattatccaaaacatccaatcttacagtttgcccaaaatcaatctgttgtgtttccacaaataacagtaagaaacccacttaaaaatgggattgtggtatatactgatggatcaaaaactggcataggtgcctatgtggctaatggtaaagtggtatccaaacaatataatgaaaattcacctcaagtggtagaatgtttagtggtcttagaagttttaaaaacctttttagaaccccttaatattgtgtcagattcctgttatgtggttaatgcagtaaatcttttagaagtggctggagtgattaagccttccagtagagttgccaatatttttcagcagatacaattagttttgttatctagaagatttcctgtttatattactcatgttagagcccattcaggcctacctggccccatggctctgggaaataatttggcagataaggccactaaagtggtggctgctgccctatcatccccggtagaggctgcaagaaattttcataacaattttcatgtgacggctgaaacattacgcagtcgtttctccttgacaagaaaagaagcccgtgacattgttactcaatgtcaaagctgctgtgagttcttgccagttcctcatgtgggaattaacccacgcggtattcgacctctacaggtctggcaaatggatgttacacatgtttcttcctttggaaaacttcaatatctccatgtgtccattgacacatgttctggcatcatgtttgcttctccattaaccggagaaaaagcctcacatgtgattcaacattgccttgaggcatggagtgcttgggggaaacccagactccttaagactgataatggaccagcttatacgtctcaaaaattccaacagttctgccgtcagatggacgtgacccacctgactggacttccatacaaccctcaaggacagggtattgttgagcgtgcgcatcgcaccctcaaaacctatcttataaaacagaagaggggaacttttgaggagactgtaccccgagcaccaagagtgtcggtgtctatggcactctttacactcaattttttaaatattgatgctcatggccatactgcggctgaacgtcattgtacagagccagataggcccaatgagatggttaaatggaaaaatgtccttgataataaatggtatggcccggatcctattttgataagatccaggggagctatctgtgttttcccacagaatgaaaacaacccattttggataccagaaagactcacccgaaaaatccagactgaccaaggaaatactaatgtccctcgtcttggtgatgtccagggcgtcaataataaaaagagagcagcgttgggggataatgtcgacatttccactcccaatgacggtgatgtataa

SEQ ID NO: 357 - DNA, 8833 bp, Artificial Sequence
  Description of Artificial Sequence: Synthetic polynucleotide
gaattcgagcttgcatgcctgcaggtcgttacataacttacggtaaatggcccgcctggctgaccgcccaacgacccccgcccattgacgtcaataatgacgtatgttcccatagtaacgccaatagggactttccattgacgtcaatgggtggagtatttacggtaaactgcccacttggcagtacatcaagtgtatcatatgccaagtacgccccctattgacgtcaatgacggtaaatggcccgcctggcattatgcccagtacatgaccttatgggactttcctacttggcagtacatctacgtattagtcatcgctattaccatggtgatgcggttttggcagtacatcaatgggcgtggatagcggtttgactcacggggatttccaagtctccaccccattgacgtcaatgggagtttgttttggcaccaaaatcaacgggactttccaaaatgtcgtaacaactccgccccattgacgcaaatgggcggtaggcgtgtacggtgggaggtctatataagcagagctcgtttagtgaaccgtcagggacggggtttcgttttctctctctcttgcttctcgctcgctcttgcttcttgcactctggctcctgaagatgtaagcaataaagttttgccgcagaagattctggtctgtggtgttcttcctggccgggcgtgagaacgcgtctaataacaattggtgccgaattccgggacgagaaaaaaactcgggactggcgcaaggaagatccctcattccagaaccagaactgcgggtcgcggtaataaaggttcccgtaaagcagactgttaagaaggattcaactgtatgaattcagaacttttcagctggggaacgagagtaccagtgagtacagctttacgaggtaagtctgatcttgaactttctaaggaaattcaagacagtctatcagaagtaaagtggaatatgtttggccttgaattttttctggtgttaggagcccttttgttccttttcacatgttatcaagtgattaagatagggctgaaaattctagaggaaattcaggacaagctatcagaagtaaagcggggagagagagtaggagcaaagagaaaatatggtacacaaaataagtatacaggcctttccaagggtcttgaacccgaggaaaagttaaggttaggtaggaatacctggagagagattagaagaaaaagaggaaaaagggaaaagaagaaagatcaattagcggaggtctctaggagatactcgtcactagatgagctcaggaagccagctcttagtagttctgaagcagatgaagaattctcctctgaggaaacagactgggaggaagaagcagcccattaccagccagctaattggtcaagaaaaaagccaaaagcggctggcgaaggccagtttgctgattggcctcagggcagtcggcttcaaggtccgccctatgcggagtccccgccctgcgtagtgcgtcagcaatgcgcagagaggcagtgcgcagagaggcagtgcgcagactcattcattcccagagaggaacaaaggaaaatacaacaggcatttccggtctttgaaggagccgagggtgggcgtgtccacgctccggtagaatacttacaaattaaagaaattgccgagtcggtccgtaaatatggaaccaatgctaattttaccttggtgcagttagacaggctcgccggcatggcactaactcctgctgactggcaaacggttgtaaaagccgctctccctagtatgggcaaatatatggaatggagagcgctttggcacgaagctgcacaagcgcaggcccgagcaaacgcagctgctttgactccagagcagagagattggacttttgacttgttaacgggtcagggagcttattctgctgatcagacaaactaccattggggagcttatgcccagatttcttccacggctattagggcctggaaggcgctctctcgagcaggtgaaaccactggtcagttaacaaagataatccagggacctcaggaatccttctcagattttgtggccagaatgacagaggcagcagagcgtatttttggagagtcagagcaagctgcgcctctgatagaacagctaatctatgagcaagccacaaaggagtgccgagcggccatagccccaagaaagaacaaaggcttacaagactggctcagggtctgtcgagagcttgggggacctctcagcaatgcaggtttagcggctgccatccttcaatcccaaaaccgctccatgggcagaaataatcagaggacatgttttaactgcggaaagcctgggcattttaagaaagattgcagagctccagataaacagggagggactctcactctttgctctaagtgtggcaagggttatcatagagctgaccagtgtcgctctgtgagggatataaagggcagagtccttcccccacctgatagtcaatcagctgatgtgccaaaaaacgggtcatcgggccctcggtcccagggccctcaaagatatgggaaccggtttgtcaggacccaggaagcagtcagagaggcgacccaggaagacccacaagggtggacctgcgtgccgcctccgacttcctactaatgcctcaaatgagtattcagccggtgccggtggagcctataccatccttgcccccgggaaccatgggccttattctcggccggggttcactcaccttgcagggcttagtagtccaccctggagttatggattgtcaacattcccctgaaatacaggtcctgtgctcaagccctaaaggcgttttttctattagtaaaggagataggatagctcagctgctgctcctccctgataataccagggagaaatttgcaggacctgagataaagaaaatgggctcctcaggaaatgattctgcctatttggttgtatctttaaatgatagacctaagctccgccttaagattaacggaaaagagtttgaaggcatccttgataccggagcagataaaagtataatttctacacattggtggcccaaagcatggcccaccacagagtcatctcattcattacagggcctaggatatcaatcatgtcccactataagctccattgccttgacgtgggaatcctctgaaggacagcaagggaaattcataccttatgtgctcccactcccggttaacctctggggaagggatattatgcagcatttgggccttattttgtccaatgaaaacgccccatcaggagggtattcagctaaagcaaaaaatatcatggcaaagatgggttataaagaaggaaaagggttaggacatcaagaacagggaaggatagagcccatctcacctaatggaaaccaagacagacagggtctgggttttccttagcgtaatgctcaagtagaacaaacgacccaacacccgtgcgttttattctgtctttttattgccgatcccccggccgctttacttgtacagctcgtccatgccgagagtgatcccggcggcggtcacgaactccagcaggaccatgtgatcgcgcttctcgttggggtctttgctcagggcggactgggtgctcaggtaagtatcaaggttacaagacaggtttaaggagaccaatagaaactgggcttgtcgagacagagaagactcttgcgtttctgataggcacctattggtcttactgacatccactttgcctttctctccacaggtagtggttgtcgggcagcagcacggggccgtcgccgatgggggtgttctgctggtagtggtcggcgagctgcacgctgccgtcctcgatgttgtggcggatcttgaagttcaccttgatgccgttcttctgcttgtcggccatgatatagacgttgtggctgttgtagttgtactccagcttgtgccccaggatgttgccgtcctccttgaagtcgatgcccttcagctcgatgcggttcaccagggtgtcgccctcgaacttcacctcggcgcgggtcttgtagttgccgtcgtccttgaagaagatggtgcgctcctggacgtagccttcgggcatggcggacttgaagaagtcgtgctgcttcatgtggtcggggtagcggctgaagcactgcacgccgtaggtcagggtggtcacgagggtgggccagggcacgggcagcttgccggtggtgcagatgaacttcagggtcagcttgccgtaggtggcatcgccctcgccctcgccggacacgctgaacttgtggccgtttacgtcgccgtccagctcgaccaggatgggcaccaccccggtgaacagctcctcgcccttgctcaccatggtggctttaccaacagtaccggaatgccaagcttgggtcctgtgttctggcggcaaacccgttgcgaaaaagaacgttcacggcgactactgcacttatatacggttctcccccaccctcgggaaaaaggcggagccagtacacgacatcactttcccagtttaccccgcgccaccttctctaggcaccggatcaattgccgacccctccccccaacttctcggggactgtgggcgatgtgcgctctgcccttctcctgcttttttaccactaactaggaactgggtttggccttaattcagacagccttggctctgtctggacaggtccagacaactgacaccattaacactttgtcagcctcagtgactacagtcatagatgaacaggcctcagctaatgtcaagatacagagaggtctcatgctggttaatcaactcatagatcttgtccagatacaactagatgtattatgacaattaactcagctgggatgtgaacaaaagtttccgggattgtgtgttatttccattcagtatgttaaatttactaggacagctaatttgtcaaaaagtctttttcagtatatgttacagaattggatggctgaatttgaacagatccttcgggaattgagacttcaggtcaactccacgcgcttggacctgtcgctgaccaaaggattacccaattggatctcctcagcattttccttctttaaaaaatgggtgggattaatattatttggagatacactttgctgtggattagtgttgcttctttgattggtctgtaagcttaaggcctaaactaggagagacaaggtggttattgcccaggcgcttgcaggactagaacatggagctccccctgatatatggttatctatgcttaggcaataggtcgctggccactcagctcttacatctcacgaggctagactcattgcacgggatggagtgagtgtgcttcagcagcccgagagagttgcacggctaagcactgcaatggaaaggctctgcggcatatatgagcctattctagggagacatgtcatctttcatgaaggttcagtgtcctagttcccttcccccaggcaaaacgacacgggagcaggtcagggttgctctgggtaaaagcctgtgagcctaagagctaatcctgtacatggctcctttacctacacactggggatttgacctctatctccactctcattaatatgggtggcctatttgctcttattaaaagaaaagggggagatgttgggagccgcgcccacattcgccgttacaagatggcgctgacagctgtgttctaagtggtaaacaaataatctgcgcatgtgccgagggtggttcttcactctatgtgctctgccttccccgtgacgtcaactcggccgatgggctgcagccaatcagggagtgacacgtcctaggcgaaggagaattctctttaatagggacggggttttgttttctctctctcttgcttctcgctcgctcttgcttcttgcactctggctcctgaagatgtaagcaataaagttttgccgcagaagattctggtctgtggtgttcttcctggccgggcgtgagaacgcgtctaataacagcggccgcaacaggggatccagacatgataagatacattgatgagtttggacaaaccacaactagaatgcagtgaaaaaaatgctttatttgtgaaatttgtgatgctattgctttatttgtaaccattataagctgcaataaacaagttaacaacaacaattgcattcattttatgtttcaggttcagggggaggtgtgggaggttttttcggatcctctagagtcgacctgcaggcatgcaagcttggcgtaatcatggtcatagctgtttcctgtgtgaaattgttatccgctcacaattccacacaacatacgagccggaagcataaagtgtaaagcctggggtgcctaatgagtgagctaactcacattaattgcgttgcgctcactgcccgctttccagtcgggaaacctgtcgtgccagctgcattaatgaatcggccaacgcgcggggagaggcggtttgcgtattgggcgctcttccgcttcctcgctcactgactcgctgcgctcggtcgttcggctgcggcgagcggtatcagctcactcaaaggcggtaatacggttatccacagaatcaggggataacgcaggaaagaacatgtgagcaaaaggccagcaaaaggccaggaaccgtaaaaaggccgcgttgctggcgtttttccataggctccgcccccctgacgagcatcacaaaaatcgacgctcaagtcagaggtggcgaaacccgacaggactataaagataccaggcgtttccccctggaagctccctcgtgcgctctcctgttccgaccctgccgcttaccggatacctgtccgcctttctcccttcgggaagcgtggcgctttctcatagctcacgctgtaggtatctcagttcggtgtaggtcgttcgctccaagctgggctgtgtgcacgaaccccccgttcagcccgaccgctgcgccttatccggtaactatcgtcttgagtccaacccggtaagacacgacttatcgccactggcagcagccactggtaacaggattagcagagcgaggtatgtaggcggtgctacagagttcttgaagtggtggcctaactacggctacactagaaggacagtatttggtatctgcgctctgctgaagccagttaccttcggaaaaagagttggtagctcttgatccggcaaacaaaccaccgctggtagcggtggtttttttgtttgcaagcagcagattacgcgcagaaaaaaaggatctcaagaagatcctttgatcttttctacggggtctgacgctcagtggaacgaaaactcacgttaagggattttggtcatgagattatcaaaaaggatcttcacctagatccttttaaattaaaaatgaagttttaaatcaatctaaagtatatatgagtaaacttggtctgacagttaccaatgcttaatcagtgaggcacctatctcagcgatctgtctatttcgttcatccatagttgcctgactccccgtcgtgtagataactacgatacgggagggcttaccatctggccccagtgctgcaatgataccgcgagacccacgctcaccggctccagatttatcagcaataaaccagccagccggaagggccgagcgcagaagtggtcctgcaactttatccgcctccatccagtctattaattgttgccgggaagctagagtaagtagttcgccagttaatagtttgcgcaacgttgttgccattgctacaggcatcgtggtgtcacgctcgtcgtttggtatggcttcattcagctccggttcccaacgatcaaggcgagttacatgatcccccatgttgtgcaaaaaagcggttagctccttcggtcctccgatcgttgtcagaagtaagttggccgcagtgttatcactcatggttatggcagcactgcataattctcttactgtcatgccatccgtaagatgcttttctgtgactggtgagtactcaaccaagtcattctgagaatagtgtatgcggcgaccgagttgctcttgcccggcgtcaatacgggataataccgcgccacatagcagaactttaaaagtgctcatcattggaaaacgttcttcggggcgaaaactctcaaggatcttaccgctgttgagatccagttcgatgtaacccactcgtgcacccaactgatcttcagcatcttttactttcaccagcgtttctgggtgagcaaaaacaggaaggcaaaatgccgcaaaaaagggaataagggcgacacggaaatgttgaatactcatactcttcctttttcaatattattgaagcatttatcagggttattgtctcatgagcggatacatatttgaatgtatttagaaaaataaacaaataggggttccgcgcacatttccccgaaaagtgccacctgacgtctaagaaaccattattatcatgacattaacctataaaaataggcgtatcacgaggccctttcgtctcgcgcgtttcggtgatgacggtgaaaacctctgacacatgcagctcccggagacggtcacagcttgtctgtaagcggatgccgggagcagacaagcccgtcagggcgcgtcagcgggtgttggcgggtgtcggggctggcttaactatgcggcatcagagcagattgtactgagagtgcaccatatgcggtgtgaaataccgcacagatgcgtaaggagaaaataccgcatcaggcgccattcgccattcaggctgcgcaactgttgggaagggcgatcggtgcgggcctcttcgctattacgccagctggcgaaagggggatgtgctgcaaggcgattaagttgggtaacgccagggttttcccagtcacgacgttgtaaaacgacggccagt

SEQ ID NO: 358 - DNA, 11479 bp, Artificial Sequence
  Description of Artificial Sequence: Synthetic polynucleotide
gaattcgagcttgcatgcctgcaggtcgttacataacttacggtaaatggcccgcctggctgaccgcccaacgacccccgcccattgacgtcaataatgacgtatgttcccatagtaacgccaatagggactttccattgacgtcaatgggtggagtatttacggtaaactgcccacttggcagtacatcaagtgtatcatatgccaagtacgccccctattgacgtcaatgacggtaaatggcccgcctggcattatgcccagtacatgaccttatgggactttcctacttggcagtacatctacgtattagtcatcgctattaccatggtgatgcggttttggcagtacatcaatgggcgtggatagcggtttgactcacggggatttccaagtctccaccccattgacgtcaatgggagtttgttttggcaccaaaatcaacgggactttccaaaatgtcgtaacaactccgccccattgacgcaaatgggcggtaggcgtgtacggtgggaggtctatataagcagagctcgtttagtgaaccgtcagggacggggtttcgttttctctctctcttgcttctcgctcgctcttgcttcttgcactctggctcctgaagatgtaagcaataaagttttgccgcagaagattctggtctgtggtgttcttcctggccgggcgtgagaacgcgtctaataacaattggtgccgaattccgggacgagaaaaaaactcgggactggcgcaaggaagatccctcattccagaaccagaactgcgggtcgcggtaataaaggttcccgtaaagcagactgttaagaaggattcaactgtatgaattcagaacttttcagctggggaacgagagtaccagtgagtacagctttacgaggtaagtctgatcttgaactttctaaggaaattcaagacagtctatcagaagtaaagtggaatatgtttggccttgaattttttctggtgttaggagcccttttgttccttttcacatgttatcaagtgattaagatagggctgaaaattctagaggaaattcaggacaagctatcagaagtaaagcggggagagagagtaggagcaaagagaaaatatggtacacaaaataagtatacaggcctttccaagggtcttgaacccgaggaaaagttaaggttaggtaggaatacctggagagagattagaagaaaaagaggaaaaagggaaaagaagaaagatcaattagcggaggtctctaggagatactcgtcactagatgagctcaggaagccagctcttagtagttctgaagcagatgaagaattctcctctgaggaaacagactgggaggaagaagcagcccattaccagccagctaattggtcaagaaaaaagccaaaagcggctggcgaaggccagtttgctgattggcctcagggcagtcggcttcaaggtccgccctatgcggagtccccgccctgcgtagtgcgtcagcaatgcgcagagaggcagtgcgcagagaggcagtgcgcagactcattcattcccagagaggaacaaaggaaaatacaacaggcatttccggtctttgaaggagccgagggtgggcgtgtccacgctccggtagaatacttacaaattaaagaaattgccgagtcggtccgtaaatatggaaccaatgctaattttaccttggtgcagttagacaggctcgccggcatggcactaactcctgctgactggcaaacggttgtaaaagccgctctccctagtatgggcaaatatatggaatggagagcgctttggcacgaagctgcacaagcgcaggcccgagcaaacgcagctgctttgactccagagcagagagattggacttttgacttgttaacgggtcagggagcttattctgctgatcagacaaactaccattggggagcttatgcccagatttcttccacggctattagggcctggaaggcgctctctcgagcaggtgaaaccactggtcagttaacaaagataatccagggacctcaggaatccttctcagattttgtggccagaatgacagaggcagcagagcgtatttttggagagtcagagcaagctgcgcctctgatagaacagctaatctatgagcaagccacaaaggagtgccgagcggccatagccccaagaaagaacaaaggcttacaagactggctcagggtctgtcgagagcttgggggacctctcagcaatgcaggtttagcggctgccatccttcaatcccaaaaccgctccatgggcagaaataatcagaggacatgttttaactgcggaaagcctgggcattttaagaaagattgcagagctccagataaacagggagggactctcactctttgctctaagtgtggcaagggttatcatagagctgaccagtgtcgctctgtgagggatataaagggcagagtccttcccccacctgatagtcaatcagctgatgtgccaaaaaacgggtcatcgggccctcggtcccagggccctcaaagatatgggaaccggtttgtcaggacccaggaagcagtcagagaggcgacccaggaagacccacaagggtggacctgcgtgccgcctccgacttcctactaatgcctcaaatgagtattcagccggtgccggtggagcctataccatccttgcccccgggaaccatgggccttattctcggccggggttcactcaccttgcagggcttagtagtccaccctggagttatggattgtcaacattcccctgaaatacaggtcctgtgctcaagccctaaaggcgttttttctattagtaaaggagataggatagctcagctgctgctcctccctgataataccagggagaaatttgcaggacctgagataaagaaaatgggctcctcaggaaatgattctgcctatttggttgtatctttaaatgatagacctaagctccgccttaagattaacggaaaagagtttgaaggcatccttgataccggagcagataaaagtataatttctacacattggtggcccaaagcatggcccaccacagagtcatctcattcattacagggcctaggatatcaatcatgtcccactataagctccattgccttgacgtgggaatcctctgaaggacagcaagggaaattcataccttatgtgctcccactcccggttaacctctggggaagggatattatgcagcatttgggccttattttgtccaatgaaaacgccccatcaggagggtattcagctaaagcaaaaaatatcatggcaaagatgggttataaagaaggaaaagggttaggacatcaagaacagggaaggatagagcccatctcacctaatggaaaccaagacagacagggtctgggttttccttagcggccattggggcagcacgacccataccatggaaaacaggggacccagtgtgggttcctcaatggcacctatcctctgaaaaactagaagctgtgattcaactggtagaggaacaattaaaactaggccatattgaaccctctacctcaccttggaatactccaatttttgtaattaagaaaaagtcaggaaagtggagactgctccatgacctcagagccattaatgagcaaatgaacttatttggcccagtacagaggggtctccctgtactttccgccttaccacgtggctggaatttaattattatagatattaaagattgtttcttttctatacctttgtgtccaagggataggcccagatttgcctttaccatcccctctattaatcacatggaacctgataagaggtatcaatggaaggtcttaccacagggaatgtccaatagtcctacaatgtgccaactttatgtgcaagaagctcttttgccagtgagggaacaattcccctctttaattttgctcctttacatggatgacatcctcctgtgccataaagaccttaccatgctacaaaaggcatatccttttctacttaaaactttaagtcagtggggtttacagatagccacagaaaaggtccaaatttctgatacaggacaattcttgggctctgtggtgtccccagataagattgtgccccaaaaggtagagataagaagagatcacctccataccttaaatgattttcaaaagctgttgggagatattaattggctcagaccttttttaaagattccttccgctgagttaaggcctttgtttagtattttagaaggagatcctcatatctcctcccctaggactcttactctagctgctaaccaggccttacaaaaggtggaaaaagccttacagaatgcacaattacaacgtattgaggattcgcagcctttcagtttgtgtgtctttaagacagcacaattgccaactgcagttttgtggcagaatgggccattgttgtggatccatccaaacgtatccccagctaaaataatagattggtatcctgatgcaattgcacagcttgcccttaaaggtctaaaagcagcaatcacccactttgggcaaagtccatatcttttaattgtaccttataccgctgcacaggttcaaaccttggcagccacatctaatgattgggcagttttagttacctccttttcaggaaaaatagataaccattatccaaaacatccaatcttacagtttgcccaaaatcaatctgttgtgtttccacaaataacagtaagaaacccacttaaaaatgggattgtggtatatactgatggatcaaaaactggcataggtgcctatgtggctaatggtaaagtggtatccaaacaatataatgaaaattcacctcaagtggtagaatgtttagtggtcttagaagttttaaaaacctttttagaaccccttaatattgtgtcagattcctgttatgtggttaatgcagtaaatcttttagaagtggctggagtgattaagccttccagtagagttgccaatatttttcagcagatacaattagttttgttatctagaagatttcctgtttatattactcatgttagagcccattcaggcctacctggccccatggctctgggaaataatttggcagataaggccactaaagtggtggctgctgccctatcatccccggtagaggctgcaagaaattttcataacaattttcatgtgacggctgaaacattacgcagtcgtttctccttgacaagaaaagaagcccgtgacattgttactcaatgtcaaagctgctgtgagttcttgccagttcctcatgtgggaattaacccacgcggtattcgacctctacaggtctggcaaatggatgttacacatgtttcttcctttggaaaacttcaatatctccatgtgtccattgacacatgttctggcatcatgtttgcttctccattaaccggagaaaaagcctcacatgtgattcaacattgccttgaggcatggagtgcttgggggaaacccagactccttaagactgataatggaccagcttatacgtctcaaaaattccaacagttctgccgtcagatggacgtgacccacctgactggacttccatacaaccctcaaggacagggtattgttgagcgtgcgcatcgcaccctcaaaacctatcttataaaacagaagaggggaacttttgaggagactgtaccccgagcaccaagagtgtcggtgtctatggcactctttacactcaattttttaaatattgatgctcatggccatactgcggctgaacgtcattgtacagagccagataggcccaatgagatggttaaatggaaaaatgtccttgataataaatggtatggcccggatcctattttgataagatccaggggagctatctgtgttttcccacagaatgaaaacaacccattttggataccagaaagactcacccgaaaaatccagactgaccaaggaaatactaatgtccctcgtcttggtgatgtccagggcgtcaataataaaaagagagcagcgttgggggataatgtcgacatttccactcccaatgacggtgatgtataatgctcaagtagaacaaacgacccaacacccgtgcgttttattctgtctttttattgccgatcccccggccgctttacttgtacagctcgtccatgccgagagtgatcccggcggcggtcacgaactccagcaggaccatgtgatcgcgcttctcgttggggtctttgctcagggcggactgggtgctcaggtaagtatcaaggttacaagacaggtttaaggagaccaatagaaactgggcttgtcgagacagagaagactcttgcgtttctgataggcacctattggtcttactgacatccactttgcctttctctccacaggtagtggttgtcgggcagcagcacggggccgtcgccgatgggggtgttctgctggtagtggtcggcgagctgcacgctgccgtcctcgatgttgtggcggatcttgaagttcaccttgatgccgttcttctgcttgtcggccatgatatagacgttgtggctgttgtagttgtactccagcttgtgccccaggatgttgccgtcctccttgaagtcgatgcccttcagctcgatgcggttcaccagggtgtcgccctcgaacttcacctcggcgcgggtcttgtagttgccgtcgtccttgaagaagatggtgcgctcctggacgtagccttcgggcatggcggacttgaagaagtcgtgctgcttcatgtggtcggggtagcggctgaagcactgcacgccgtaggtcagggtggtcacgagggtgggccagggcacgggcagcttgccggtggtgcagatgaacttcagggtcagcttgccgtaggtggcatcgccctcgccctcgccggacacgctgaacttgtggccgtttacgtcgccgtccagctcgaccaggatgggcaccaccccggtgaacagctcctcgcccttgctcaccatggtggctttaccaacagtaccggaatgccaagcttgggtcctgtgttctggcggcaaacccgttgcgaaaaagaacgttcacggcgactactgcacttatatacggttctcccccaccctcgggaaaaaggcggagccagtacacgacatcactttcccagtttaccccgcgccaccttctctaggcaccggatcaattgccgacccctccccccaacttctcggggactgtgggcgatgtgcgctctgcccttctcctgcttttttaccactaactaggaactgggtttggccttaattcagacagccttggctctgtctggacaggtccagacaactgacaccattaacactttgtcagcctcagtgactacagtcatagatgaacaggcctcagctaatgtcaagatacagagaggtctcatgctggttaatcaactcatagatcttgtccagatacaactagatgtattatgacaattaactcagctgggatgtgaacaaaagtttccgggattgtgtgttatttccattcagtatgttaaatttactaggacagctaatttgtcaaaaagtctttttcagtatatgttacagaattggatggctgaatttgaacagatccttcgggaattgagacttcaggtcaactccacgcgcttggacctgtcgctgaccaaaggattacccaattggatctcctcagcattttccttctttaaaaaatgggtgggattaatattatttggagatacactttgctgtggattagtgttgcttctttgattggtctgtaagcttaaggcctaaactaggagagacaaggtggttattgcccaggcgcttgcaggactagaacatggagctccccctgatatatggttatctatgcttaggcaataggtcgctggccactcagctcttacatctcacgaggctagactcattgcacgggatggagtgagtgtgcttcagcagcccgagagagttgcacggctaagcactgcaatggaaaggctctgcggcatatatgagcctattctagggagacatgtcatctttcatgaaggttcagtgtcctagttcccttcccccaggcaaaacgacacgggagcaggtcagggttgctctgggtaaaagcctgtgagcctaagagctaatcctgtacatggctcctttacctacacactggggatttgacctctatctccactctcattaatatgggtggcctatttgctcttattaaaagaaaagggggagatgttgggagccgcgcccacattcgccgttacaagatggcgctgacagctgtgttctaagtggtaaacaaataatctgcgcatgtgccgagggtggttcttcactctatgtgctctgccttccccgtgacgtcaactcggccgatgggctgcagccaatcagggagtgacacgtcctaggcgaaggagaattctctttaatagggacggggttttgttttctctctctcttgcttctcgctcgctcttgcttcttgcactctggctcctgaagatgtaagcaataaagttttgccgcagaagattctggtctgtggtgttcttcctggccgggcgtgagaacgcgtctaataacagcggccgcaacaggggatccagacatgataagatacattgatgagtttggacaaaccacaactagaatgcagtgaaaaaaatgctttatttgtgaaatttgtgatgctattgctttatttgtaaccattataagctgcaataaacaagttaacaacaacaattgcattcattttatgtttcaggttcagggggaggtgtgggaggttttttcggatcctctagagtcgacctgcaggcatgcaagcttggcgtaatcatggtcatagctgtttcctgtgtgaaattgttatccgctcacaattccacacaacatacgagccggaagcataaagtgtaaagcctggggtgcctaatgagtgagctaactcacattaattgcgttgcgctcactgcccgctttccagtcgggaaacctgtcgtgccagctgcattaatgaatcggccaacgcgcggggagaggcggtttgcgtattgggcgctcttccgcttcctcgctcactgactcgctgcgctcggtcgttcggctgcggcgagcggtatcagctcactcaaaggcggtaatacggttatccacagaatcaggggataacgcaggaaagaacatgtgagcaaaaggccagcaaaaggccaggaaccgtaaaaaggccgcgttgctggcgtttttccataggctccgcccccctgacgagcatcacaaaaatcgacgctcaagtcagaggtggcgaaacccgacaggactataaagataccaggcgtttccccctggaagctccctcgtgcgctctcctgttccgaccctgccgcttaccggatacctgtccgcctttctcccttcgggaagcgtggcgctttctcatagctcacgctgtaggtatctcagttcggtgtaggtcgttcgctccaagctgggctgtgtgcacgaaccccccgttcagcccgaccgctgcgccttatccggtaactatcgtcttgagtccaacccggtaagacacgacttatcgccactggcagcagccactggtaacaggattagcagagcgaggtatgtaggcggtgctacagagttcttgaagtggtggcctaactacggctacactagaaggacagtatttggtatctgcgctctgctgaagccagttaccttcggaaaaagagttggtagctcttgatccggcaaacaaaccaccgctggtagcggtggtttttttgtttgcaagcagcagattacgcgcagaaaaaaaggatctcaagaagatcctttgatcttttctacggggtctgacgctcagtggaacgaaaactcacgttaagggattttggtcatgagattatcaaaaaggatcttcacctagatccttttaaattaaaaatgaagttttaaatcaatctaaagtatatatgagtaaacttggtctgacagttaccaatgcttaatcagtgaggcacctatctcagcgatctgtctatttcgttcatccatagttgcctgactccccgtcgtgtagataactacgatacgggagggcttaccatctggccccagtgctgcaatgataccgcgagacccacgctcaccggctccagatttatcagcaataaaccagccagccggaagggccgagcgcagaagtggtcctgcaactttatccgcctccatccagtctattaattgttgccgggaagctagagtaagtagttcgccagttaatagtttgcgcaacgttgttgccattgctacaggcatcgtggtgtcacgctcgtcgtttggtatggcttcattcagctccggttcccaacgatcaaggcgagttacatgatcccccatgttgtgcaaaaaagcggttagctccttcggtcctccgatcgttgtcagaagtaagttggccgcagtgttatcactcatggttatggcagcactgcataattctcttactgtcatgccatccgtaagatgcttttctgtgactggtgagtactcaaccaagtcattctgagaatagtgtatgcggcgaccgagttgctcttgcccggcgtcaatacgggataataccgcgccacatagcagaactttaaaagtgctcatcattggaaaacgttcttcggggcgaaaactctcaaggatcttaccgctgttgagatccagttcgatgtaacccactcgtgcacccaactgatcttcagcatcttttactttcaccagcgtttctgggtgagcaaaaacaggaaggcaaaatgccgcaaaaaagggaataagggcgacacggaaatgttgaatactcatactcttcctttttcaatattattgaagcatttatcagggttattgtctcatgagcggatacatatttgaatgtatttagaaaaataaacaaataggggttccgcgcacatttccccgaaaagtgccacctgacgtctaagaaaccattattatcatgacattaacctataaaaataggcgtatcacgaggccctttcgtctcgcgcgtttcggtgatgacggtgaaaacctctgacacatgcagctcccggagacggtcacagcttgtctgtaagcggatgccgggagcagacaagcccgtcagggcgcgtcagcgggtgttggcgggtgtcggggctggcttaactatgcggcatcagagcagattgtactgagagtgcaccatatgcggtgtgaaataccgcacagatgcgtaaggagaaaataccgcatcaggcgccattcgccattcaggctgcgcaactgttgggaagggcgatcggtgcgggcctcttcgctattacgccagctggcgaaagggggatgtgctgcaaggcgattaagttgggtaacgccagggttttcccagtcacgacgttgtaaaacgacggccagt

SEQ ID NO: 359 - DNA, 11480 bp, Artificial Sequence
  Description of Artificial Sequence: Synthetic polynucleotide
gaattcgagcttgcatgcctgcaggtcgttacataacttacggtaaatggcccgcctggctgaccgcccaacgacccccgcccattgacgtcaataatgacgtatgttcccatagtaacgccaatagggactttccattgacgtcaatgggtggagtatttacggtaaactgcccacttggcagtacatcaagtgtatcatatgccaagtacgccccctattgacgtcaatgacggtaaatggcccgcctggcattatgcccagtacatgaccttatgggactttcctacttggcagtacatctacgtattagtcatcgctattaccatggtgatgcggttttggcagtacatcaatgggcgtggatagcggtttgactcacggggatttccaagtctccaccccattgacgtcaatgggagtttgttttggcaccaaaatcaacgggactttccaaaatgtcgtaacaactccgccccattgacgcaaatgggcggtaggcgtgtacggtgggaggtctatataagcagagctcgtttagtgaaccgtcagggacggggtttcgttttctctctctcttgcttctcgctcgctcttgcttcttgcactctggctcctgaagatgtaagcaataaagttttgccgcagaagattctggtctgtggtgttcttcctggccgggcgtgagaacgcgtctaataacaatttagcgactaaacacatcacgagaaaaaaactcgggactggcgcaaggaagatccctcattccagaaccagaactgcgggtcgcggtaataaaggttcccgtaaagcagactgttaagaaggattcaactgtatgaattcagaacttttcagctggggaacgagagtaccagtgagtacagctttacgaggtaagtctgatcttgaactttctaaggaaattcaagacagtctatcagaagtaaagtggaatatgtttggccttgaattttttctggtgttaggagcccttttgttccttttcacatgttatcaagtgattaagatagggctgaaaattctagaggaaattcaggacaagctatcagaagtaaagcggggagagagagtaggagcaaagagaaaatatggtacacaaaataagtatacaggcctttccaagggtcttgaacccgaggaaaagttaaggttaggtaggaatacctggagagagattagaagaaaaagaggaaaaagggaaaagaagaaagatcaattagcggaggtctctaggagatactcgtcactagatgagctcaggaagccagctcttagtagttctgaagcagatgaagaattctcctctgaggaaacagactgggaggaagaagcagcccattaccagccagctaattggtcaagaaaaaagccaaaagcggctggcgaaggccagtttgctgattggcctcagggcagtcggcttcaaggtccgccctatgcggagtccccgccctgcgtagtgcgtcagcaatgcgcagagaggcagtgcgcagagaggcagtgcgcagactcattcattcccagagaggaacaaaggaaaatacaacaggcatttccggtctttgaaggagccgagggtgggcgtgtccacgctccggtagaatacttacaaattaaagaaattgccgagtcggtccgtaaatatggaaccaatgctaattttaccttggtgcagttagacaggctcgccggcatggcactaactcctgctgactggcaaacggttgtaaaagccgctctccctagtatgggcaaatatatggaatggagagcgctttggcacgaagctgcacaagcgcaggcccgagcaaacgcagctgctttgactccagagcagagagattggacttttgacttgttaacgggtcagggagcttattctgctgatcagacaaactaccattggggagcttatgcccagatttcttccacggctattagggcctggaaggcgctctctcgagcaggtgaaaccactggtcagttaacaaagataatccagggacctcaggaatccttctcagattttgtggccagaatgacagaggcagcagagcgtatttttggagagtcagagcaagctgcgcctctgatagaacagctaatctatgagcaagccacaaaggagtgccgagcggccatagccccaagaaagaacaaaggcttacaagactggctcagggtctgtcgagagcttgggggacctctcagcaatgcaggtttagcggctgccatccttcaatcccaaaaccgctccatgggcagaaataatcagaggacatgttttaactgcggaaagcctgggcattttaagaaagattgcagagctccagataaacagggagggactctcactctttgctctaagtgtggcaagggttatcatagagctgaccagtgtcgctctgtgagggatataaagggcagagtccttcccccacctgatagtcaatcagctgatgtgccaaaaaacgggtcatcgggccctcggtcccagggccctcaaagatatgggaaccggtttgtcaggacccaggaagcagtcagagaggcgacccaggaagacccacaagggtggacctgcgtgccgcctccgacttcctactaatgcctcaaatgagtattcagccggtgccggtggagcctataccatccttgcccccgggaaccatgggccttattctcggccggggttcactcaccttgcagggcttagtagtccaccctggagttatggattgtcaacattcccctgaaatacaggtcctgtgctcaagccctaaaggcgttttttctattagtaaaggagataggatagctcagctgctgctcctccctgataataccagggagaaatttgcaggacctgagataaagaaaatgggctcctcaggaaatgattctgcctatttggttgtatctttaaatgatagacctaagctccgccttaagattaacggaaaagagtttgaaggcatccttgataccggagcagataaaagtataatttctacacattggtggcccaaagcatggcccaccacagagtcatctcattcattacagggcctaggatatcaatcatgtcccactataagctccattgccttgacgtgggaatcctctgaaggacagcaagggaaattcataccttatgtgctcccactcccggttaacctctggggaagggatattatgcagcatttgggccttattttgtccaatgaaaacgccccatcaggagggtattcagctaaagcaaaaaatatcatggcaaagatgggttataaagaaggaaaagggttaggacatcaagaacagggaaggatagagcccatctcacctaatggaaaccaagacagacagggtctgggttttccttagcggccattggggcagcacgacccataccatggaaaacaggggacccagtgtgggttcctcaatggcacctatcctctgaaaaactagaagctgtgattcaactggtagaggaacaattaaaactaggccatattgaaccctctacctcaccttggaatactccaatttttgtaattaagaaaaagtcaggaaagtggagactgctccatgacctcagagccattaatgagcaaatgaacttatttggcccagtacagaggggtctccctgtactttccgccttaccacgtggctggaatttaattattatagatattaaagattgtttcttttctatacctttgtgtccaagggataggcccagatttgcctttaccatcccctctattaatcacatggaacctgataagaggtatcaatggaaggtcttaccacagggaatgtccaatagtcctacaatgtgccaactttatgtgcaagaagctcttttgccagtgagggaacaattcccctctttaattttgctcctttacatggatgacatcctcctgtgccataaagaccttaccatgctacaaaaggcatatccttttctacttaaaactttaagtcagtggggtttacagatagccacagaaaaggtccaaatttctgatacaggacaattcttgggctctgtggtgtccccagataagattgtgccccaaaaggtagagataagaagagatcacctccataccttaaatgattttcaaaagctgttgggagatattaattggctcagaccttttttaaagattccttccgctgagttaaggcctttgtttagtattttagaaggagatcctcatatctcctcccctaggactcttactctagctgctaaccaggccttacaaaaggtggaaaaagccttacagaatgcacaattacaacgtattgaggattcgcagcctttcagtttgtgtgtctttaagacagcacaattgccaactgcagttttgtggcagaatgggccattgttgtggatccatccaaacgtatccccagctaaaataatagattggtatcctgatgcaattgcacagcttgcccttaaaggtctaaaagcagcaatcacccactttgggcaaagtccatatcttttaattgtaccttataccgctgcacaggttcaaaccttggcagccacatctaatgattgggcagttttagttacctccttttcaggaaaaatagataaccattatccaaaacatccaatcttacagtttgcccaaaatcaatctgttgtgtttccacaaataacagtaagaaacccacttaaaaatgggattgtggtatatactgatggatcaaaaactggcataggtgcctatgtggctaatggtaaagtggtatccaaacaatataatgaaaattcacctcaagtggtagaatgtttagtggtcttagaagttttaaaaacctttttagaaccccttaatattgtgtcagattcctgttatgtggttaatgcagtaaatcttttagaagtggctggagtgattaagccttccagtagagttgccaatatttttcagcagatacaattagttttgttatctagaagatttcctgtttatattactcatgttagagcccattcaggcctacctggccccatggctctgggaaataatttggcagataaggccactaaagtggtggctgctgccctatcatccccggtagaggctgcaagaaattttcataacaattttcatgtgacggctgaaacattacgcagtcgtttctccttgacaagaaaagaagcccgtgacattgttactcaatgtcaaagctgctgtgagttcttgccagttcctcatgtgggaattaacccacgcggtattcgacctctacaggtctggcaaatggatgttacacatgtttcttcctttggaaaacttcaatatctccatgtgtccattgacacatgttctggcatcatgtttgcttctccattaaccggagaaaaagcctcacatgtgattcaacattgccttgaggcatggagtgcttgggggaaacccagactccttaagactgataatggaccagcttatacgtctcaaaaattccaacagttctgccgtcagatggacgtgacccacctgactggacttccatacaaccctcaaggacagggtattgttgagcgtgcgcatcgcaccctcaaaacctatcttataaaacagaagaggggaacttttgaggagactgtaccccgagcaccaagagtgtcggtgtctatggcactctttacactcaattttttaaatattgatgctcatggccatactgcggctgaacgtcattgtacagagccagataggcccaatgagatggttaaatggaaaaatgtccttgataataaatggtatggcccggatcctattttgataagatccaggggagctatctgtgttttcccacagaatgaaaacaacccattttggataccagaaagactcacccgaaaaatccagactgaccaaggaaatactaatgtccctcgtcttggtgatgtccagggcgtcaataataaaaagagagcagcgttgggggataatgtcgacatttccactcccaatgacggtgatgtataatgctcaagtagaacaaacgacccaacacccgtgcgttttattctgtctttttattgccgatcccccggccgctttacttgtacagctcgtccatgccgagagtgatcccggcggcggtcacgaactccagcaggaccatgtgatcgcgcttctcgttggggtctttgctcagggcggactgggtgctcaggtaagtatcaaggttacaagacaggtttaaggagaccaatagaaactgggcttgtcgagacagagaagactcttgcgtttctgataggcacctattggtcttactgacatccactttgcctttctctccacaggtagtggttgtcgggcagcagcacggggccgtcgccgatgggggtgttctgctggtagtggtcggcgagctgcacgctgccgtcctcgatgttgtggcggatcttgaagttcaccttgatgccgttcttctgcttgtcggccatgatatagacgttgtggctgttgtagttgtactccagcttgtgccccaggatgttgccgtcctccttgaagtcgatgcccttcagctcgatgcggttcaccagggtgtcgccctcgaacttcacctcggcgcgggtcttgtagttgccgtcgtccttgaagaagatggtgcgctcctggacgtagccttcgggcatggcggacttgaagaagtcgtgctgcttcatgtggtcggggtagcggctgaagcactgcacgccgtaggtcagggtggtcacgagggtgggccagggcacgggcagcttgccggtggtgcagatgaacttcagggtcagcttgccgtaggtggcatcgccctcgccctcgccggacacgctgaacttgtggccgtttacgtcgccgtccagctcgaccaggatgggcaccaccccggtgaacagctcctcgcccttgctcaccatggtggctttaccaacagtaccggaatgccaagcttgggtcctgtgttctggcggcaaacccgttgcgaaaaagaacgttcacggcgactactgcacttatatacggttctcccccaccctcgggaaaaaggcggagccagtacacgacatcactttcccagtttaccccgcgccaccttctctaggcaccggatcaattgccgacccctccccccaacttctcggggactgtgggcgatgtgcgctctgcccttctcctgcttttttaccactaactaggaactgggtttggccttaattcagacagccttggctctgtctggacaggtccagacaactgacaccattaacactttgtcagcctcagtgactacagtcatagatgaacaggcctcagctaatgtcaagatacagagaggtctcatgctggttaatcaactcatagatcttgtccagatacaactagatgtattatgacaattaactcagctgggatgtgaacaaaagtttccgggattgtgtgttatttccattcagtatgttaaatttactaggacagctaatttgtcaaaaagtctttttcagtatatgttacagaattggatggctgaatttgaacagatccttcgggaattgagacttcaggtcaactccacgcgcttggacctgtcgctgaccaaaggattacccaattggatctcctcagcattttccttctttaaaaaatgggtgggattaatattatttggagatacactttgctgtggattagtgttgcttctttgattggtctgtaagcttaaggcctaaactaggagagacaaggtggttattgcccaggcgcttgcaggactagaacatggagctccccctgatatatggttatctatgcttaggcaataggtcgctggccactcagctcttacatctcacgaggctagactcattgcacgggatggagtgagtgtgcttcagcagcccgagagagttgcacggctaagcactgcaatggaaaggctctgcggcatatatgagcctattctagggagacatgtcatctttcatgaaggttcagtgtcctagttcccttcccccaggcaaaacgacacgggagcaggtcagggttgctctgggtaaaagcctgtgagcctaagagctaatcctgtacatggctcctttacctacacactggggatttgacctctatctccactctcattaatatgggtggcctatttgctcttattaaaagaaaagggggagatgttgggagccgcgcccacattcgccgttacaagatggcgctgacagctgtgttctaagtggtaaacaaataatctgcgcatgtgccgagggtggttcttcactctatgtgctctgccttccccgtgacgtcaactcggccgatgggctgcagccaatcagggagtgacacgtcctaggcgaaggagaattctctttaatagggacggggttttgttttctctctctcttgcttctcgctcgctcttgcttcttgcactctggctcctgaagatgtaagcaataaagttttgccgcagaagattctggtctgtggtgttcttcctggccgggcgtgagaacgcgtctaataacagcggccgcaacaggggatccagacatgataagatacattgatgagtttggacaaaccacaactagaatgcagtgaaaaaaatgctttatttgtgaaatttgtgatgctattgctttatttgtaaccattataagctgcaataaacaagttaacaacaacaattgcattcattttatgtttcaggttcagggggaggtgtgggaggttttttcggatcctctagagtcgacctgcaggcatgcaagcttggcgtaatcatggtcatagctgtttcctgtgtgaaattgttatccgctcacaattccacacaacatacgagccggaagcataaagtgtaaagcctggggtgcctaatgagtgagctaactcacattaattgcgttgcgctcactgcccgctttccagtcgggaaacctgtcgtgccagctgcattaatgaatcggccaacgcgcggggagaggcggtttgcgtattgggcgctcttccgcttcctcgctcactgactcgctgcgctcggtcgttcggctgcggcgagcggtatcagctcactcaaaggcggtaatacggttatccacagaatcaggggataacgcaggaaagaacatgtgagcaaaaggccagcaaaaggccaggaaccgtaaaaaggccgcgttgctggcgtttttccataggctccgcccccctgacgagcatcacaaaaatcgacgctcaagtcagaggtggcgaaacccgacaggactataaagataccaggcgtttccccctggaagctccctcgtgcgctctcctgttccgaccctgccgcttaccggatacctgtccgcctttctcccttcgggaagcgtggcgctttctcatagctcacgctgtaggtatctcagttcggtgtaggtcgttcgctccaagctgggctgtgtgcacgaaccccccgttcagcccgaccgctgcgccttatccggtaactatcgtcttgagtccaacccggtaagacacgacttatcgccactggcagcagccactggtaacaggattagcagagcgaggtatgtaggcggtgctacagagttcttgaagtggtggcctaactacggctacactagaaggacagtatttggtatctgcgctctgctgaagccagttaccttcggaaaaagagttggtagctcttgatccggcaaacaaaccaccgctggtagcggtggtttttttgtttgcaagcagcagattacgcgcagaaaaaaaggatctcaagaagatcctttgatcttttctacggggtctgacgctcagtggaacgaaaactcacgttaagggattttggtcatgagattatcaaaaaggatcttcacctagatccttttaaattaaaaatgaagttttaaatcaatctaaagtatatatgagtaaacttggtctgacagttaccaatgcttaatcagtgaggcacctatctcagcgatctgtctatttcgttcatccatagttgcctgactccccgtcgtgtagataactacgatacgggagggcttaccatctggccccagtgctgcaatgataccgcgagacccacgctcaccggctccagatttatcagcaataaaccagccagccggaagggccgagcgcagaagtggtcctgcaactttatccgcctccatccagtctattaattgttgccgggaagctagagtaagtagttcgccagttaatagtttgcgcaacgttgttgccattgctacaggcatcgtggtgtcacgctcgtcgtttggtatggcttcattcagctccggttcccaacgatcaaggcgagttacatgatcccccatgttgtgcaaaaaagcggttagctccttcggtcctccgatcgttgtcagaagtaagttggccgcagtgttatcactcatggttatggcagcactgcataattctcttactgtcatgccatccgtaagatgcttttctgtgactggtgagtactcaaccaagtcattctgagaatagtgtatgcggcgaccgagttgctcttgcccggcgtcaatacgggataataccgcgccacatagcagaactttaaaagtgctcatcattggaaaacgttcttcggggcgaaaactctcaaggatcttaccgctgttgagatccagttcgatgtaacccactcgtgcacccaactgatcttcagcatcttttactttcaccagcgtttctgggtgagcaaaaacaggaaggcaaaatgccgcaaaaaagggaataagggcgacacggaaatgttgaatactcatactcttcctttttcaatattattgaagcatttatcagggttattgtctcatgagcggatacatatttgaatgtatttagaaaaataaacaaataggggttccgcgcacatttccccgaaaagtgccacctgacgtctaagaaaccattattatcatgacattaacctataaaaataggcgtatcacgaggccctttcgtctcgcgcgtttcggtgatgacggtgaaaacctctgacacatgcagctcccggagacggtcacagcttgtctgtaagcggatgccgggagcagacaagcccgtcagggcgcgtcagcgggtgttggcgggtgtcggggctggcttaactatgcggcatcagagcagattgtactgagagtgcaccatatgcggtgtgaaataccgcacagatgcgtaaggagaaaataccgcatcaggcgccattcgccattcaggctgcgcaactgttgggaagggcgatcggtgcgggcctcttcgctattacgccagctggcgaaagggggatgtgctgcaaggcgattaagttgggtaacgccagggttttcccagtcacgacgttgtaaaacgacggccagt

SEQ ID NO: 360 - DNA, 8803 bp, Artificial Sequence
  Description of Artificial Sequence: Synthetic polynucleotide
gaattcgagcttgcatgcctgcaggtcgttacataacttacggtaaatggcccgcctggctgaccgcccaacgacccccgcccattgacgtcaataatgacgtatgttcccatagtaacgccaatagggactttccattgacgtcaatgggtggagtatttacggtaaactgcccacttggcagtacatcaagtgtatcatatgccaagtacgccccctattgacgtcaatgacggtaaatggcccgcctggcattatgcccagtacatgaccttatgggactttcctacttggcagtacatctacgtattagtcatcgctattaccatggtgatgcggttttggcagtacatcaatgggcgtggatagcggtttgactcacggggatttccaagtctccaccccattgacgtcaatgggagtttgttttggcaccaaaatcaacgggactttccaaaatgtcgtaacaactccgccccattgacgcaaatgggcggtaggcgtgtacggtgggaggtctatataagcagagctgttttctctctctcttgcttctcgctcgctcttgcttcttgcactctggctcctgaagatgtaagcaataaagttttgccgcagaagattctggtctgtggtgttcttcctggccgggcgtgagaacgcgtctaataacaattggtgccgaattccgggacgagaaaaaaactcgggactggcgcaaggaagatccctcattccagaaccagaactgcgggtcgcggtaataaaggttcccgtaaagcagactgttaagaaggattcaactgtatgaattcagaacttttcagctggggaacgagagtaccagtgagtacagctttacgaggtaagtctgatcttgaactttctaaggaaattcaagacagtctatcagaagtaaagtggaatatgtttggccttgaattttttctggtgttaggagcccttttgttccttttcacatgttatcaagtgattaagatagggctgaaaattctagaggaaattcaggacaagctatcagaagtaaagcggggagagagagtaggagcaaagagaaaatatggtacacaaaataagtatacaggcctttccaagggtcttgaacccgaggaaaagttaaggttaggtaggaatacctggagagagattagaagaaaaagaggaaaaagggaaaagaagaaagatcaattagcggaggtctctaggagatactcgtcactagatgagctcaggaagccagctcttagtagttctgaagcagatgaagaattctcctctgaggaaacagactgggaggaagaagcagcccattaccagccagctaattggtcaagaaaaaagccaaaagcggctggcgaaggccagtttgctgattggcctcagggcagtcggcttcaaggtccgccctatgcggagtccccgccctgcgtagtgcgtcagcaatgcgcagagaggcagtgcgcagagaggcagtgcgcagactcattcattcccagagaggaacaaaggaaaatacaacaggcatttccggtctttgaaggagccgagggtgggcgtgtccacgctccggtagaatacttacaaattaaagaaattgccgagtcggtccgtaaatatggaaccaatgctaattttaccttggtgcagttagacaggctcgccggcatggcactaactcctgctgactggcaaacggttgtaaaagccgctctccctagtatgggcaaatatatggaatggagagcgctttggcacgaagctgcacaagcgcaggcccgagcaaacgcagctgctttgactccagagcagagagattggacttttgacttgttaacgggtcagggagcttattctgctgatcagacaaactaccattggggagcttatgcccagatttcttccacggctattagggcctggaaggcgctctctcgagcaggtgaaaccactggtcagttaacaaagataatccagggacctcaggaatccttctcagattttgtggccagaatgacagaggcagcagagcgtatttttggagagtcagagcaagctgcgcctctgatagaacagctaatctatgagcaagccacaaaggagtgccgagcggccatagccccaagaaagaacaaaggcttacaagactggctcagggtctgtcgagagcttgggggacctctcagcaatgcaggtttagcggctgccatccttcaatcccaaaaccgctccatgggcagaaataatcagaggacatgttttaactgcggaaagcctgggcattttaagaaagattgcagagctccagataaacagggagggactctcactctttgctctaagtgtggcaagggttatcatagagctgaccagtgtcgctctgtgagggatataaagggcagagtccttcccccacctgatagtcaatcagctgatgtgccaaaaaacgggtcatcgggccctcggtcccagggccctcaaagatatgggaaccggtttgtcaggacccaggaagcagtcagagaggcgacccaggaagacccacaagggtggacctgcgtgccgcctccgacttcctactaatgcctcaaatgagtattcagccggtgccggtggagcctataccatccttgcccccgggaaccatgggccttattctcggccggggttcactcaccttgcagggcttagtagtccaccctggagttatggattgtcaacattcccctgaaatacaggtcctgtgctcaagccctaaaggcgttttttctattagtaaaggagataggatagctcagctgctgctcctccctgataataccagggagaaatttgcaggacctgagataaagaaaatgggctcctcaggaaatgattctgcctatttggttgtatctttaaatgatagacctaagctccgccttaagattaacggaaaagagtttgaaggcatccttgataccggagcagataaaagtataatttctacacattggtggcccaaagcatggcccaccacagagtcatctcattcattacagggcctaggatatcaatcatgtcccactataagctccattgccttgacgtgggaatcctctgaaggacagcaagggaaattcataccttatgtgctcccactcccggttaacctctggggaagggatattatgcagcatttgggccttattttgtccaatgaaaacgccccatcaggagggtattcagctaaagcaaaaaatatcatggcaaagatgggttataaagaaggaaaagggttaggacatcaagaacagggaaggatagagcccatctcacctaatggaaaccaagacagacagggtctgggttttccttagcgtaatgctcaagtagaacaaacgacccaacacccgtgcgttttattctgtctttttattgccgatcccccggccgctttacttgtacagctcgtccatgccgagagtgatcccggcggcggtcacgaactccagcaggaccatgtgatcgcgcttctcgttggggtctttgctcagggcggactgggtgctcaggtaagtatcaaggttacaagacaggtttaaggagaccaatagaaactgggcttgtcgagacagagaagactcttgcgtttctgataggcacctattggtcttactgacatccactttgcctttctctccacaggtagtggttgtcgggcagcagcacggggccgtcgccgatgggggtgttctgctggtagtggtcggcgagctgcacgctgccgtcctcgatgttgtggcggatcttgaagttcaccttgatgccgttcttctgcttgtcggccatgatatagacgttgtggctgttgtagttgtactccagcttgtgccccaggatgttgccgtcctccttgaagtcgatgcccttcagctcgatgcggttcaccagggtgtcgccctcgaacttcacctcggcgcgggtcttgtagttgccgtcgtccttgaagaagatggtgcgctcctggacgtagccttcgggcatggcggacttgaagaagtcgtgctgcttcatgtggtcggggtagcggctgaagcactgcacgccgtaggtcagggtggtcacgagggtgggccagggcacgggcagcttgccggtggtgcagatgaacttcagggtcagcttgccgtaggtggcatcgccctcgccctcgccggacacgctgaacttgtggccgtttacgtcgccgtccagctcgaccaggatgggcaccaccccggtgaacagctcctcgcccttgctcaccatggtggctttaccaacagtaccggaatgccaagcttgggtcctgtgttctggcggcaaacccgttgcgaaaaagaacgttcacggcgactactgcacttatatacggttctcccccaccctcgggaaaaaggcggagccagtacacgacatcactttcccagtttaccccgcgccaccttctctaggcaccggatcaattgccgacccctccccccaacttctcggggactgtgggcgatgtgcgctctgcccttctcctgcttttttaccactaactaggaactgggtttggccttaattcagacagccttggctctgtctggacaggtccagacaactgacaccattaacactttgtcagcctcagtgactacagtcatagatgaacaggcctcagctaatgtcaagatacagagaggtctcatgctggttaatcaactcatagatcttgtccagatacaactagatgtattatgacaattaactcagctgggatgtgaacaaaagtttccgggattgtgtgttatttccattcagtatgttaaatttactaggacagctaatttgtcaaaaagtctttttcagtatatgttacagaattggatggctgaatttgaacagatccttcgggaattgagacttcaggtcaactccacgcgcttggacctgtcgctgaccaaaggattacccaattggatctcctcagcattttccttctttaaaaaatgggtgggattaatattatttggagatacactttgctgtggattagtgttgcttctttgattggtctgtaagcttaaggcctaaactaggagagacaaggtggttattgcccaggcgcttgcaggactagaacatggagctccccctgatatatggttatctatgcttaggcaataggtcgctggccactcagctcttacatctcacgaggctagactcattgcacgggatggagtgagtgtgcttcagcagcccgagagagttgcacggctaagcactgcaatggaaaggctctgcggcatatatgagcctattctagggagacatgtcatctttcatgaaggttcagtgtcctagttcccttcccccaggcaaaacgacacgggagcaggtcagggttgctctgggtaaaagcctgtgagcctaagagctaatcctgtacatggctcctttacctacacactggggatttgacctctatctccactctcattaatatgggtggcctatttgctcttattaaaagaaaagggggagatgttgggagccgcgcccacattcgccgttacaagatggcgctgacagctgtgttctaagtggtaaacaaataatctgcgcatgtgccgagggtggttcttcactctatgtgctctgccttccccgtgacgtcaactcggccgatgggctgcagccaatcagggagtgacacgtcctaggcgaaggagaattctctttaatagggacggggttttgttttctctctctcttgcttctcgctcgctcttgcttcttgcactctggctcctgaagatgtaagcaataaagttttgccgcagaagattctggtctgtggtgttcttcctggccgggcgtgagaacgcgtctaataacagcggccgcaacaggggatccagacatgataagatacattgatgagtttggacaaaccacaactagaatgcagtgaaaaaaatgctttatttgtgaaatttgtgatgctattgctttatttgtaaccattataagctgcaataaacaagttaacaacaacaattgcattcattttatgtttcaggttcagggggaggtgtgggaggttttttcggatcctctagagtcgacctgcaggcatgcaagcttggcgtaatcatggtcatagctgtttcctgtgtgaaattgttatccgctcacaattccacacaacatacgagccggaagcataaagtgtaaagcctggggtgcctaatgagtgagctaactcacattaattgcgttgcgctcactgcccgctttccagtcgggaaacctgtcgtgccagctgcattaatgaatcggccaacgcgcggggagaggcggtttgcgtattgggcgctcttccgcttcctcgctcactgactcgctgcgctcggtcgttcggctgcggcgagcggtatcagctcactcaaaggcggtaatacggttatccacagaatcaggggataacgcaggaaagaacatgtgagcaaaaggccagcaaaaggccaggaaccgtaaaaaggccgcgttgctggcgtttttccataggctccgcccccctgacgagcatcacaaaaatcgacgctcaagtcagaggtggcgaaacccgacaggactataaagataccaggcgtttccccctggaagctccctcgtgcgctctcctgttccgaccctgccgcttaccggatacctgtccgcctttctcccttcgggaagcgtggcgctttctcatagctcacgctgtaggtatctcagttcggtgtaggtcgttcgctccaagctgggctgtgtgcacgaaccccccgttcagcccgaccgctgcgccttatccggtaactatcgtcttgagtccaacccggtaagacacgacttatcgccactggcagcagccactggtaacaggattagcagagcgaggtatgtaggcggtgctacagagttcttgaagtggtggcctaactacggctacactagaaggacagtatttggtatctgcgctctgctgaagccagttaccttcggaaaaagagttggtagctcttgatccggcaaacaaaccaccgctggtagcggtggtttttttgtttgcaagcagcagattacgcgcagaaaaaaaggatctcaagaagatcctttgatcttttctacggggtctgacgctcagtggaacgaaaactcacgttaagggattttggtcatgagattatcaaaaaggatcttcacctagatccttttaaattaaaaatgaagttttaaatcaatctaaagtatatatgagtaaacttggtctgacagttaccaatgcttaatcagtgaggcacctatctcagcgatctgtctatttcgttcatccatagttgcctgactccccgtcgtgtagataactacgatacgggagggcttaccatctggccccagtgctgcaatgataccgcgagacccacgctcaccggctccagatttatcagcaataaaccagccagccggaagggccgagcgcagaagtggtcctgcaactttatccgcctccatccagtctattaattgttgccgggaagctagagtaagtagttcgccagttaatagtttgcgcaacgttgttgccattgctacaggcatcgtggtgtcacgctcgtcgtttggtatggcttcattcagctccggttcccaacgatcaaggcgagttacatgatcccccatgttgtgcaaaaaagcggttagctccttcggtcctccgatcgttgtcagaagtaagttggccgcagtgttatcactcatggttatggcagcactgcataattctcttactgtcatgccatccgtaagatgcttttctgtgactggtgagtactcaaccaagtcattctgagaatagtgtatgcggcgaccgagttgctcttgcccggcgtcaatacgggataataccgcgccacatagcagaactttaaaagtgctcatcattggaaaacgttcttcggggcgaaaactctcaaggatcttaccgctgttgagatccagttcgatgtaacccactcgtgcacccaactgatcttcagcatcttttactttcaccagcgtttctgggtgagcaaaaacaggaaggcaaaatgccgcaaaaaagggaataagggcgacacggaaatgttgaatactcatactcttcctttttcaatattattgaagcatttatcagggttattgtctcatgagcggatacatatttgaatgtatttagaaaaataaacaaataggggttccgcgcacatttccccgaaaagtgccacctgacgtctaagaaaccattattatcatgacattaacctataaaaataggcgtatcacgaggccctttcgtctcgcgcgtttcggtgatgacggtgaaaacctctgacacatgcagctcccggagacggtcacagcttgtctgtaagcggatgccgggagcagacaagcccgtcagggcgcgtcagcgggtgttggcgggtgtcggggctggcttaactatgcggcatcagagcagattgtactgagagtgcaccatatgcggtgtgaaataccgcacagatgcgtaaggagaaaataccgcatcaggcgccattcgccattcaggctgcgcaactgttgggaagggcgatcggtgcgggcctcttcgctattacgccagctggcgaaagggggatgtgctgcaaggcgattaagttgggtaacgccagggttttcccagtcacgacgttgtaaaacgacggccagt

SEQ ID NO: 361 - DNA, 11449 bp, Artificial Sequence
  Description of Artificial Sequence: Synthetic polynucleotide
gaattcgagcttgcatgcctgcaggtcgttacataacttacggtaaatggcccgcctggctgaccgcccaacgacccccgcccattgacgtcaataatgacgtatgttcccatagtaacgccaatagggactttccattgacgtcaatgggtggagtatttacggtaaactgcccacttggcagtacatcaagtgtatcatatgccaagtacgccccctattgacgtcaatgacggtaaatggcccgcctggcattatgcccagtacatgaccttatgggactttcctacttggcagtacatctacgtattagtcatcgctattaccatggtgatgcggttttggcagtacatcaatgggcgtggatagcggtttgactcacggggatttccaagtctccaccccattgacgtcaatgggagtttgttttggcaccaaaatcaacgggactttccaaaatgtcgtaacaactccgccccattgacgcaaatgggcggtaggcgtgtacggtgggaggtctatataagcagagctgttttctctctctcttgcttctcgctcgctcttgcttcttgcactctggctcctgaagatgtaagcaataaagttttgccgcagaagattctggtctgtggtgttcttcctggccgggcgtgagaacgcgtctaataacaattggtgccgaattccgggacgagaaaaaaactcgggactggcgcaaggaagatccctcattccagaaccagaactgcgggtcgcggtaataaaggttcccgtaaagcagactgttaagaaggattcaactgtatgaattcagaacttttcagctggggaacgagagtaccagtgagtacagctttacgaggtaagtctgatcttgaactttctaaggaaattcaagacagtctatcagaagtaaagtggaatatgtttggccttgaattttttctggtgttaggagcccttttgttccttttcacatgttatcaagtgattaagatagggctgaaaattctagaggaaattcaggacaagctatcagaagtaaagcggggagagagagtaggagcaaagagaaaatatggtacacaaaataagtatacaggcctttccaagggtcttgaacccgaggaaaagttaaggttaggtaggaatacctggagagagattagaagaaaaagaggaaaaagggaaaagaagaaagatcaattagcggaggtctctaggagatactcgtcactagatgagctcaggaagccagctcttagtagttctgaagcagatgaagaattctcctctgaggaaacagactgggaggaagaagcagcccattaccagccagctaattggtcaagaaaaaagccaaaagcggctggcgaaggccagtttgctgattggcctcagggcagtcggcttcaaggtccgccctatgcggagtccccgccctgcgtagtgcgtcagcaatgcgcagagaggcagtgcgcagagaggcagtgcgcagactcattcattcccagagaggaacaaaggaaaatacaacaggcatttccggtctttgaaggagccgagggtgggcgtgtccacgctccggtagaatacttacaaattaaagaaattgccgagtcggtccgtaaatatggaaccaatgctaattttaccttggtgcagttagacaggctcgccggcatggcactaactcctgctgactggcaaacggttgtaaaagccgctctccctagtatgggcaaatatatggaatggagagcgctttggcacgaagctgcacaagcgcaggcccgagcaaacgcagctgctttgactccagagcagagagattggacttttgacttgttaacgggtcagggagcttattctgctgatcagacaaactaccattggggagcttatgcccagatttcttccacggctattagggcctggaaggcgctctctcgagcaggtgaaaccactggtcagttaacaaagataatccagggacctcaggaatccttctcagattttgtggccagaatgacagaggcagcagagcgtatttttggagagtcagagcaagctgcgcctctgatagaacagctaatctatgagcaagccacaaaggagtgccgagcggccatagccccaagaaagaacaaaggcttacaagactggctcagggtctgtcgagagcttgggggacctctcagcaatgcaggtttagcggctgccatccttcaatcccaaaaccgctccatgggcagaaataatcagaggacatgttttaactgcggaaagcctgggcattttaagaaagattgcagagctccagataaacagggagggactctcactctttgctctaagtgtggcaagggttatcatagagctgaccagtgtcgctctgtgagggatataaagggcagagtccttcccccacctgatagtcaatcagctgatgtgccaaaaaacgggtcatcgggccctcggtcccagggccctcaaagatatgggaaccggtttgtcaggacccaggaagcagtcagagaggcgacccaggaagacccacaagggtggacctgcgtgccgcctccgacttcctactaatgcctcaaatgagtattcagccggtgccggtggagcctataccatccttgcccccgggaaccatgggccttattctcggccggggttcactcaccttgcagggcttagtagtccaccctggagttatggattgtcaacattcccctgaaatacaggtcctgtgctcaagccctaaaggcgttttttctattagtaaaggagataggatagctcagctgctgctcctccctgataataccagggagaaatttgcaggacctgagataaagaaaatgggctcctcaggaaatgattctgcctatttggttgtatctttaaatgatagacctaagctccgccttaagattaacggaaaagagtttgaaggcatccttgataccggagcagataaaagtataatttctacacattggtggcccaaagcatggcccaccacagagtcatctcattcattacagggcctaggatatcaatcatgtcccactataagctccattgccttgacgtgggaatcctctgaaggacagcaagggaaattcataccttatgtgctcccactcccggttaacctctggggaagggatattatgcagcatttgggccttattttgtccaatgaaaacgccccatcaggagggtattcagctaaagcaaaaaatatcatggcaaagatgggttataaagaaggaaaagggttaggacatcaagaacagggaaggatagagcccatctcacctaatggaaaccaagacagacagggtctgggttttccttagcggccattggggcagcacgacccataccatggaaaacaggggacccagtgtgggttcctcaatggcacctatcctctgaaaaactagaagctgtgattcaactggtagaggaacaattaaaactaggccatattgaaccctctacctcaccttggaatactccaatttttgtaattaagaaaaagtcaggaaagtggagactgctccatgacctcagagccattaatgagcaaatgaacttatttggcccagtacagaggggtctccctgtactttccgccttaccacgtggctggaatttaattattatagatattaaagattgtttcttttctatacctttgtgtccaagggataggcccagatttgcctttaccatcccctctattaatcacatggaacctgataagaggtatcaatggaaggtcttaccacagggaatgtccaatagtcctacaatgtgccaactttatgtgcaagaagctcttttgccagtgagggaacaattcccctctttaattttgctcctttacatggatgacatcctcctgtgccataaagaccttaccatgctacaaaaggcatatccttttctacttaaaactttaagtcagtggggtttacagatagccacagaaaaggtccaaatttctgatacaggacaattcttgggctctgtggtgtccccagataagattgtgccccaaaaggtagagataagaagagatcacctccataccttaaatgattttcaaaagctgttgggagatattaattggctcagaccttttttaaagattccttccgctgagttaaggcctttgtttagtattttagaaggagatcctcatatctcctcccctaggactcttactctagctgctaaccaggccttacaaaaggtggaaaaagccttacagaatgcacaattacaacgtattgaggattcgcagcctttcagtttgtgtgtctttaagacagcacaattgccaactgcagttttgtggcagaatgggccattgttgtggatccatccaaacgtatccccagctaaaataatagattggtatcctgatgcaattgcacagcttgcccttaaaggtctaaaagcagcaatcacccactttgggcaaagtccatatcttttaattgtaccttataccgctgcacaggttcaaaccttggcagccacatctaatgattgggcagttttagttacctccttttcaggaaaaatagataaccattatccaaaacatccaatcttacagtttgcccaaaatcaatctgttgtgtttccacaaataacagtaagaaacccacttaaaaatgggattgtggtatatactgatggatcaaaaactggcataggtgcctatgtggctaatggtaaagtggtatccaaacaatataatgaaaattcacctcaagtggtagaatgtttagtggtcttagaagttttaaaaacctttttagaaccccttaatattgtgtcagattcctgttatgtggttaatgcagtaaatcttttagaagtggctggagtgattaagccttccagtagagttgccaatatttttcagcagatacaattagttttgttatctagaagatttcctgtttatattactcatgttagagcccattcaggcctacctggccccatggctctgggaaataatttggcagataaggccactaaagtggtggctgctgccctatcatccccggtagaggctgcaagaaattttcataacaattttcatgtgacggctgaaacattacgcagtcgtttctccttgacaagaaaagaagcccgtgacattgttactcaatgtcaaagctgctgtgagttcttgccagttcctcatgtgggaattaacccacgcggtattcgacctctacaggtctggcaaatggatgttacacatgtttcttcctttggaaaacttcaatatctccatgtgtccattgacacatgttctggcatcatgtttgcttctccattaaccggagaaaaagcctcacatgtgattcaacattgccttgaggcatggagtgcttgggggaaacccagactccttaagactgataatggaccagcttatacgtctcaaaaattccaacagttctgccgtcagatggacgtgacccacctgactggacttccatacaaccctcaaggacagggtattgttgagcgtgcgcatcgcaccctcaaaacctatcttataaaacagaagaggggaacttttgaggagactgtaccccgagcaccaagagtgtcggtgtctatggcactctttacactcaattttttaaatattgatgctcatggccatactgcggctgaacgtcattgtacagagccagataggcccaatgagatggttaaatggaaaaatgtccttgataataaatggtatggcccggatcctattttgataagatccaggggagctatctgtgttttcccacagaatgaaaacaacccattttggataccagaaagactcacccgaaaaatccagactgaccaaggaaatactaatgtccctcgtcttggtgatgtccagggcgtcaataataaaaagagagcagcgttgggggataatgtcgacatttccactcccaatgacggtgatgtataatgctcaagtagaacaaacgacccaacacccgtgcgttttattctgtctttttattgccgatcccccggccgctttacttgtacagctcgtccatgccgagagtgatcccggcggcggtcacgaactccagcaggaccatgtgatcgcgcttctcgttggggtctttgctcagggcggactgggtgctcaggtaagtatcaaggttacaagacaggtttaaggagaccaatagaaactgggcttgtcgagacagagaagactcttgcgtttctgataggcacctattggtcttactgacatccactttgcctttctctccacaggtagtggttgtcgggcagcagcacggggccgtcgccgatgggggtgttctgctggtagtggtcggcgagctgcacgctgccgtcctcgatgttgtggcggatcttgaagttcaccttgatgccgttcttctgcttgtcggccatgatatagacgttgtggctgttgtagttgtactccagcttgtgccccaggatgttgccgtcctccttgaagtcgatgcccttcagctcgatgcggttcaccagggtgtcgccctcgaacttcacctcggcgcgggtcttgtagttgccgtcgtccttgaagaagatggtgcgctcctggacgtagccttcgggcatggcggacttgaagaagtcgtgctgcttcatgtggtcggggtagcggctgaagcactgcacgccgtaggtcagggtggtcacgagggtgggccagggcacgggcagcttgccggtggtgcagatgaacttcagggtcagcttgccgtaggtggcatcgccctcgccctcgccggacacgctgaacttgtggccgtttacgtcgccgtccagctcgaccaggatgggcaccaccccggtgaacagctcctcgcccttgctcaccatggtggctttaccaacagtaccggaatgccaagcttgggtcctgtgttctggcggcaaacccgttgcgaaaaagaacgttcacggcgactactgcacttatatacggttctcccccaccctcgggaaaaaggcggagccagtacacgacatcactttcccagtttaccccgcgccaccttctctaggcaccggatcaattgccgacccctccccccaacttctcggggactgtgggcgatgtgcgctctgcccttctcctgcttttttaccactaactaggaactgggtttggccttaattcagacagccttggctctgtctggacaggtccagacaactgacaccattaacactttgtcagcctcagtgactacagtcatagatgaacaggcctcagctaatgtcaagatacagagaggtctcatgctggttaatcaactcatagatcttgtccagatacaactagatgtattatgacaattaactcagctgggatgtgaacaaaagtttccgggattgtgtgttatttccattcagtatgttaaatttactaggacagctaatttgtcaaaaagtctttttcagtatatgttacagaattggatggctgaatttgaacagatccttcgggaattgagacttcaggtcaactccacgcgcttggacctgtcgctgaccaaaggattacccaattggatctcctcagcattttccttctttaaaaaatgggtgggattaatattatttggagatacactttgctgtggattagtgttgcttctttgattggtctgtaagcttaaggcctaaactaggagagacaaggtggttattgcccaggcgcttgcaggactagaacatggagctccccctgatatatggttatctatgcttaggcaataggtcgctggccactcagctcttacatctcacgaggctagactcattgcacgggatggagtgagtgtgcttcagcagcccgagagagttgcacggctaagcactgcaatggaaaggctctgcggcatatatgagcctattctagggagacatgtcatctttcatgaaggttcagtgtcctagttcccttcccccaggcaaaacgacacgggagcaggtcagggttgctctgggtaaaagcctgtgagcctaagagctaatcctgtacatggctcctttacctacacactggggatttgacctctatctccactctcattaatatgggtggcctatttgctcttattaaaagaaaagggggagatgttgggagccgcgcccacattcgccgttacaagatggcgctgacagctgtgttctaagtggtaaacaaataatctgcgcatgtgccgagggtggttcttcactctatgtgctctgccttccccgtgacgtcaactcggccgatgggctgcagccaatcagggagtgacacgtcctaggcgaaggagaattctctttaatagggacggggttttgttttctctctctcttgcttctcgctcgctcttgcttcttgcactctggctcctgaagatgtaagcaataaagttttgccgcagaagattctggtctgtggtgttcttcctggccgggcgtgagaacgcgtctaataacagcggccgcaacaggggatccagacatgataagatacattgatgagtttggacaaaccacaactagaatgcagtgaaaaaaatgctttatttgtgaaatttgtgatgctattgctttatttgtaaccattataagctgcaataaacaagttaacaacaacaattgcattcattttatgtttcaggttcagggggaggtgtgggaggttttttcggatcctctagagtcgacctgcaggcatgcaagcttggcgtaatcatggtcatagctgtttcctgtgtgaaattgttatccgctcacaattccacacaacatacgagccggaagcataaagtgtaaagcctggggtgcctaatgagtgagctaactcacattaattgcgttgcgctcactgcccgctttccagtcgggaaacctgtcgtgccagctgcattaatgaatcggccaacgcgcggggagaggcggtttgcgtattgggcgctcttccgcttcctcgctcactgactcgctgcgctcggtcgttcggctgcggcgagcggtatcagctcactcaaaggcggtaatacggttatccacagaatcaggggataacgcaggaaagaacatgtgagcaaaaggccagcaaaaggccaggaaccgtaaaaaggccgcgttgctggcgtttttccataggctccgcccccctgacgagcatcacaaaaatcgacgctcaagtcagaggtggcgaaacccgacaggactataaagataccaggcgtttccccctggaagctccctcgtgcgctctcctgttccgaccctgccgcttaccggatacctgtccgcctttctcccttcgggaagcgtggcgctttctcatagctcacgctgtaggtatctcagttcggtgtaggtcgttcgctccaagctgggctgtgtgcacgaaccccccgttcagcccgaccgctgcgccttatccggtaactatcgtcttgagtccaacccggtaagacacgacttatcgccactggcagcagccactggtaacaggattagcagagcgaggtatgtaggcggtgctacagagttcttgaagtggtggcctaactacggctacactagaaggacagtatttggtatctgcgctctgctgaagccagttaccttcggaaaaagagttggtagctcttgatccggcaaacaaaccaccgctggtagcggtggtttttttgtttgcaagcagcagattacgcgcagaaaaaaaggatctcaagaagatcctttgatcttttctacggggtctgacgctcagtggaacgaaaactcacgttaagggattttggtcatgagattatcaaaaaggatcttcacctagatccttttaaattaaaaatgaagttttaaatcaatctaaagtatatatgagtaaacttggtctgacagttaccaatgcttaatcagtgaggcacctatctcagcgatctgtctatttcgttcatccatagttgcctgactccccgtcgtgtagataactacgatacgggagggcttaccatctggccccagtgctgcaatgataccgcgagacccacgctcaccggctccagatttatcagcaataaaccagccagccggaagggccgagcgcagaagtggtcctgcaactttatccgcctccatccagtctattaattgttgccgggaagctagagtaagtagttcgccagttaatagtttgcgcaacgttgttgccattgctacaggcatcgtggtgtcacgctcgtcgtttggtatggcttcattcagctccggttcccaacgatcaaggcgagttacatgatcccccatgttgtgcaaaaaagcggttagctccttcggtcctccgatcgttgtcagaagtaagttggccgcagtgttatcactcatggttatggcagcactgcataattctcttactgtcatgccatccgtaagatgcttttctgtgactggtgagtactcaaccaagtcattctgagaatagtgtatgcggcgaccgagttgctcttgcccggcgtcaatacgggataataccgcgccacatagcagaactttaaaagtgctcatcattggaaaacgttcttcggggcgaaaactctcaaggatcttaccgctgttgagatccagttcgatgtaacccactcgtgcacccaactgatcttcagcatcttttactttcaccagcgtttctgggtgagcaaaaacaggaaggcaaaatgccgcaaaaaagggaataagggcgacacggaaatgttgaatactcatactcttcctttttcaatattattgaagcatttatcagggttattgtctcatgagcggatacatatttgaatgtatttagaaaaataaacaaataggggttccgcgcacatttccccgaaaagtgccacctgacgtctaagaaaccattattatcatgacattaacctataaaaataggcgtatcacgaggccctttcgtctcgcgcgtttcggtgatgacggtgaaaacctctgacacatgcagctcccggagacggtcacagcttgtctgtaagcggatgccgggagcagacaagcccgtcagggcgcgtcagcgggtgttggcgggtgtcggggctggcttaactatgcggcatcagagcagattgtactgagagtgcaccatatgcggtgtgaaataccgcacagatgcgtaaggagaaaataccgcatcaggcgccattcgccattcaggctgcgcaactgttgggaagggcgatcggtgcgggcctcttcgctattacgccagctggcgaaagggggatgtgctgcaaggcgattaagttgggtaacgccagggttttcccagtcacgacgttgtaaaacgacggccagt

SEQ ID NO: 362 - DNA, 11450 bp, Artificial Sequence
  Description of Artificial Sequence: Synthetic polynucleotide
gaattcgagcttgcatgcctgcaggtcgttacataacttacggtaaatggcccgcctggctgaccgcccaacgacccccgcccattgacgtcaataatgacgtatgttcccatagtaacgccaatagggactttccattgacgtcaatgggtggagtatttacggtaaactgcccacttggcagtacatcaagtgtatcatatgccaagtacgccccctattgacgtcaatgacggtaaatggcccgcctggcattatgcccagtacatgaccttatgggactttcctacttggcagtacatctacgtattagtcatcgctattaccatggtgatgcggttttggcagtacatcaatgggcgtggatagcggtttgactcacggggatttccaagtctccaccccattgacgtcaatgggagtttgttttggcaccaaaatcaacgggactttccaaaatgtcgtaacaactccgccccattgacgcaaatgggcggtaggcgtgtacggtgggaggtctatataagcagagctgttttctctctctcttgcttctcgctcgctcttgcttcttgcactctggctcctgaagatgtaagcaataaagttttgccgcagaagattctggtctgtggtgttcttcctggccgggcgtgagaacgcgtctaataacaatttagcgactaaacacatcacgagaaaaaaactcgggactggcgcaaggaagatccctcattccagaaccagaactgcgggtcgcggtaataaaggttcccgtaaagcagactgttaagaaggattcaactgtatgaattcagaacttttcagctggggaacgagagtaccagtgagtacagctttacgaggtaagtctgatcttgaactttctaaggaaattcaagacagtctatcagaagtaaagtggaatatgtttggccttgaattttttctggtgttaggagcccttttgttccttttcacatgttatcaagtgattaagatagggctgaaaattctagaggaaattcaggacaagctatcagaagtaaagcggggagagagagtaggagcaaagagaaaatatggtacacaaaataagtatacaggcctttccaagggtcttgaacccgaggaaaagttaaggttaggtaggaatacctggagagagattagaagaaaaagaggaaaaagggaaaagaagaaagatcaattagcggaggtctctaggagatactcgtcactagatgagctcaggaagccagctcttagtagttctgaagcagatgaagaattctcctctgaggaaacagactgggaggaagaagcagcccattaccagccagctaattggtcaagaaaaaagccaaaagcggctggcgaaggccagtttgctgattggcctcagggcagtcggcttcaaggtccgccctatgcggagtccccgccctgcgtagtgcgtcagcaatgcgcagagaggcagtgcgcagagaggcagtgcgcagactcattcattcccagagaggaacaaaggaaaatacaacaggcatttccggtctttgaaggagccgagggtgggcgtgtccacgctccggtagaatacttacaaattaaagaaattgccgagtcggtccgtaaatatggaaccaatgctaattttaccttggtgcagttagacaggctcgccggcatggcactaactcctgctgactggcaaacggttgtaaaagccgctctccctagtatgggcaaatatatggaatggagagcgctttggcacgaagctgcacaagcgcaggcccgagcaaacgcagctgctttgactccagagcagagagattggacttttgacttgttaacgggtcagggagcttattctgctgatcagacaaactaccattggggagcttatgcccagatttcttccacggctattagggcctggaaggcgctctctcgagcaggtgaaaccactggtcagttaacaaagataatccagggacctcaggaatccttctcagattttgtggccagaatgacagaggcagcagagcgtatttttggagagtcagagcaagctgcgcctctgatagaacagctaatctatgagcaagccacaaaggagtgccgagcggccatagccccaagaaagaacaaaggcttacaagactggctcagggtctgtcgagagcttgggggacctctcagcaatgcaggtttagcggctgccatccttcaatcccaaaaccgctccatgggcagaaataatcagaggacatgttttaactgcggaaagcctgggcattttaagaaagattgcagagctccagataaacagggagggactctcactctttgctctaagtgtggcaagggttatcatagagctgaccagtgtcgctctgtgagggatataaagggcagagtccttcccccacctgatagtcaatcagctgatgtgccaaaaaacgggtcatcgggccctcggtcccagggccctcaaagatatgggaaccggtttgtcaggacccaggaagcagtcagagaggcgacccaggaagacccacaagggtggacctgcgtgccgcctccgacttcctactaatgcctcaaatgagtattcagccggtgccggtggagcctataccatccttgcccccgggaaccatgggccttattctcggccggggttcactcaccttgcagggcttagtagtccaccctggagttatggattgtcaacattcccctgaaatacaggtcctgtgctcaagccctaaaggcgttttttctattagtaaaggagataggatagctcagctgctgctcctccctgataataccagggagaaatttgcaggacctgagataaagaaaatgggctcctcaggaaatgattctgcctatttggttgtatctttaaatgatagacctaagctccgccttaagattaacggaaaagagtttgaaggcatccttgataccggagcagataaaagtataatttctacacattggtggcccaaagcatggcccaccacagagtcatctcattcattacagggcctaggatatcaatcatgtcccactataagctccattgccttgacgtgggaatcctctgaaggacagcaagggaaattcataccttatgtgctcccactcccggttaacctctggggaagggatattatgcagcatttgggccttattttgtccaatgaaaacgccccatcaggagggtattcagctaaagcaaaaaatatcatggcaaagatgggttataaagaaggaaaagggttaggacatcaagaacagggaaggatagagcccatctcacctaatggaaaccaagacagacagggtctgggttttccttagcggccattggggcagcacgacccataccatggaaaacaggggacccagtgtgggttcctcaatggcacctatcctctgaaaaactagaagctgtgattcaactggtagaggaacaattaaaactaggccatattgaaccctctacctcaccttggaatactccaatttttgtaattaagaaaaagtcaggaaagtggagactgctccatgacctcagagccattaatgagcaaatgaacttatttggcccagtacagaggggtctccctgtactttccgccttaccacgtggctggaatttaattattatagatattaaagattgtttcttttctatacctttgtgtccaagggataggcccagatttgcctttaccatcccctctattaatcacatggaacctgataagaggtatcaatggaaggtcttaccacagggaatgtccaatagtcctacaatgtgccaactttatgtgcaagaagctcttttgccagtgagggaacaattcccctctttaattttgctcctttacatggatgacatcctcctgtgccataaagaccttaccatgctacaaaaggcatatccttttctacttaaaactttaagtcagtggggtttacagatagccacagaaaaggtccaaatttctgatacaggacaattcttgggctctgtggtgtccccagataagattgtgccccaaaaggtagagataagaagagatcacctccataccttaaatgattttcaaaagctgttgggagatattaattggctcagaccttttttaaagattccttccgctgagttaaggcctttgtttagtattttagaaggagatcctcatatctcctcccctaggactcttactctagctgctaaccaggccttacaaaaggtggaaaaagccttacagaatgcacaattacaacgtattgaggattcgcagcctttcagtttgtgtgtctttaagacagcacaattgccaactgcagttttgtggcagaatgggccattgttgtggatccatccaaacgtatccccagctaaaataatagattggtatcctgatgcaattgcacagcttgcccttaaaggtctaaaagcagcaatcacccactttgggcaaagtccatatcttttaattgtaccttataccgctgcacaggttcaaaccttggcagccacatctaatgattgggcagttttagttacctccttttcaggaaaaatagataaccattatccaaaacatccaatcttacagtttgcccaaaatcaatctgttgtgtttccacaaataacagtaagaaacccacttaaaaatgggattgtggtatatactgatggatcaaaaactggcataggtgcctatgtggctaatggtaaagtggtatccaaacaatataatgaaaattcacctcaagtggtagaatgtttagtggtcttagaagttttaaaaacctttttagaaccccttaatattgtgtcagattcctgttatgtggttaatgcagtaaatcttttagaagtggctggagtgattaagccttccagtagagttgccaatatttttcagcagatacaattagttttgttatctagaagatttcctgtttatattactcatgttagagcccattcaggcctacctggccccatggctctgggaaataatttggcagataaggccactaaagtggtggctgctgccctatcatccccggtagaggctgcaagaaattttcataacaattttcatgtgacggctgaaacattacgcagtcgtttctccttgacaagaaaagaagcccgtgacattgttactcaatgtcaaagctgctgtgagttcttgccagttcctcatgtgggaattaacccacgcggtattcgacctctacaggtctggcaaatggatgttacacatgtttcttcctttggaaaacttcaatatctccatgtgtccattgacacatgttctggcatcatgtttgcttctccattaaccggagaaaaagcctcacatgtgattcaacattgccttgaggcatggagtgcttgggggaaacccagactccttaagactgataatggaccagcttatacgtctcaaaaattccaacagttctgccgtcagatggacgtgacccacctgactggacttccatacaaccctcaaggacagggtattgttgagcgtgcgcatcgcaccctcaaaacctatcttataaaacagaagaggggaacttttgaggagactgtaccccgagcaccaagagtgtcggtgtctatggcactctttacactcaattttttaaatattgatgctcatggccatactgcggctgaacgtcattgtacagagccagataggcccaatgagatggttaaatggaaaaatgtccttgataataaatggtatggcccggatcctattttgataagatccaggggagctatctgtgttttcccacagaatgaaaacaacccattttggataccagaaagactcacccgaaaaatccagactgaccaaggaaatactaatgtccctcgtcttggtgatgtccagggcgtcaataataaaaagagagcagcgttgggggataatgtcgacatttccactcccaatgacggtgatgtataatgctcaagtagaacaaacgacccaacacccgtgcgttttattctgtctttttattgccgatcccccggccgctttacttgtacagctcgtccatgccgagagtgatcccggcggcggtcacgaactccagcaggaccatgtgatcgcgcttctcgttggggtctttgctcagggcggactgggtgctcaggtaagtatcaaggttacaagacaggtttaaggagaccaatagaaactgggcttgtcgagacagagaagactcttgcgtttctgataggcacctattggtcttactgacatccactttgcctttctctccacaggtagtggttgtcgggcagcagcacggggccgtcgccgatgggggtgttctgctggtagtggtcggcgagctgcacgctgccgtcctcgatgttgtggcggatcttgaagttcaccttgatgccgttcttctgcttgtcggccatgatatagacgttgtggctgttgtagttgtactccagcttgtgccccaggatgttgccgtcctccttgaagtcgatgcccttcagctcgatgcggttcaccagggtgtcgccctcgaacttcacctcggcgcgggtcttgtagttgccgtcgtccttgaagaagatggtgcgctcctggacgtagccttcgggcatggcggacttgaagaagtcgtgctgcttcatgtggtcggggtagcggctgaagcactgcacgccgtaggtcagggtggtcacgagggtgggccagggcacgggcagcttgccggtggtgcagatgaacttcagggtcagcttgccgtaggtggcatcgccctcgccctcgccggacacgctgaacttgtggccgtttacgtcgccgtccagctcgaccaggatgggcaccaccccggtgaacagctcctcgcccttgctcaccatggtggctttaccaacagtaccggaatgccaagcttgggtcctgtgttctggcggcaaacccgttgcgaaaaagaacgttcacggcgactactgcacttatatacggttctcccccaccctcgggaaaaaggcggagccagtacacgacatcactttcccagtttaccccgcgccaccttctctaggcaccggatcaattgccgacccctccccccaacttctcggggactgtgggcgatgtgcgctctgcccttctcctgcttttttaccactaactaggaactgggtttggccttaattcagacagccttggctctgtctggacaggtccagacaactgacaccattaacactttgtcagcctcagtgactacagtcatagatgaacaggcctcagctaatgtcaagatacagagaggtctcatgctggttaatcaactcatagatcttgtccagatacaactagatgtattatgacaattaactcagctgggatgtgaacaaaagtttccgggattgtgtgttatttccattcagtatgttaaatttactaggacagctaatttgtcaaaaagtctttttcagtatatgttacagaattggatggctgaatttgaacagatccttcgggaattgagacttcaggtcaactccacgcgcttggacctgtcgctgaccaaaggattacccaattggatctcctcagcattttccttctttaaaaaatgggtgggattaatattatttggagatacactttgctgtggattagtgttgcttctttgattggtctgtaagcttaaggcctaaactaggagagacaaggtggttattgcccaggcgcttgcaggactagaacatggagctccccctgatatatggttatctatgcttaggcaataggtcgctggccactcagctcttacatctcacgaggctagactcattgcacgggatggagtgagtgtgcttcagcagcccgagagagttgcacggctaagcactgcaatggaaaggctctgcggcatatatgagcctattctagggagacatgtcatctttcatgaaggttcagtgtcctagttcccttcccccaggcaaaacgacacgggagcaggtcagggttgctctgggtaaaagcctgtgagcctaagagctaatcctgtacatggctcctttacctacacactggggatttgacctctatctccactctcattaatatgggtggcctatttgctcttattaaaagaaaagggggagatgttgggagccgcgcccacattcgccgttacaagatggcgctgacagctgtgttctaagtggtaaacaaataatctgcgcatgtgccgagggtggttcttcactctatgtgctctgccttccccgtgacgtcaactcggccgatgggctgcagccaatcagggagtgacacgtcctaggcgaaggagaattctctttaatagggacggggttttgttttctctctctcttgcttctcgctcgctcttgcttcttgcactctggctcctgaagatgtaagcaataaagttttgccgcagaagattctggtctgtggtgttcttcctggccgggcgtgagaacgcgtctaataacagcggccgcaacaggggatccagacatgataagatacattgatgagtttggacaaaccacaactagaatgcagtgaaaaaaatgctttatttgtgaaatttgtgatgctattgctttatttgtaaccattataagctgcaataaacaagttaacaacaacaattgcattcattttatgtttcaggttcagggggaggtgtgggaggttttttcggatcctctagagtcgacctgcaggcatgcaagcttggcgtaatcatggtcatagctgtttcctgtgtgaaattgttatccgctcacaattccacacaacatacgagccggaagcataaagtgtaaagcctggggtgcctaatgagtgagctaactcacattaattgcgttgcgctcactgcccgctttccagtcgggaaacctgtcgtgccagctgcattaatgaatcggccaacgcgcggggagaggcggtttgcgtattgggcgctcttccgcttcctcgctcactgactcgctgcgctcggtcgttcggctgcggcgagcggtatcagctcactcaaaggcggtaatacggttatccacagaatcaggggataacgcaggaaagaacatgtgagcaaaaggccagcaaaaggccaggaaccgtaaaaaggccgcgttgctggcgtttttccataggctccgcccccctgacgagcatcacaaaaatcgacgctcaagtcagaggtggcgaaacccgacaggactataaagataccaggcgtttccccctggaagctccctcgtgcgctctcctgttccgaccctgccgcttaccggatacctgtccgcctttctcccttcgggaagcgtggcgctttctcatagctcacgctgtaggtatctcagttcggtgtaggtcgttcgctccaagctgggctgtgtgcacgaaccccccgttcagcccgaccgctgcgccttatccggtaactatcgtcttgagtccaacccggtaagacacgacttatcgccactggcagcagccactggtaacaggattagcagagcgaggtatgtaggcggtgctacagagttcttgaagtggtggcctaactacggctacactagaaggacagtatttggtatctgcgctctgctgaagccagttaccttcggaaaaagagttggtagctcttgatccggcaaacaaaccaccgctggtagcggtggtttttttgtttgcaagcagcagattacgcgcagaaaaaaaggatctcaagaagatcctttgatcttttctacggggtctgacgctcagtggaacgaaaactcacgttaagggattttggtcatgagattatcaaaaaggatcttcacctagatccttttaaattaaaaatgaagttttaaatcaatctaaagtatatatgagtaaacttggtctgacagttaccaatgcttaatcagtgaggcacctatctcagcgatctgtctatttcgttcatccatagttgcctgactccccgtcgtgtagataactacgatacgggagggcttaccatctggccccagtgctgcaatgataccgcgagacccacgctcaccggctccagatttatcagcaataaaccagccagccggaagggccgagcgcagaagtggtcctgcaactttatccgcctccatccagtctattaattgttgccgggaagctagagtaagtagttcgccagttaatagtttgcgcaacgttgttgccattgctacaggcatcgtggtgtcacgctcgtcgtttggtatggcttcattcagctccggttcccaacgatcaaggcgagttacatgatcccccatgttgtgcaaaaaagcggttagctccttcggtcctccgatcgttgtcagaagtaagttggccgcagtgttatcactcatggttatggcagcactgcataattctcttactgtcatgccatccgtaagatgcttttctgtgactggtgagtactcaaccaagtcattctgagaatagtgtatgcggcgaccgagttgctcttgcccggcgtcaatacgggataataccgcgccacatagcagaactttaaaagtgctcatcattggaaaacgttcttcggggcgaaaactctcaaggatcttaccgctgttgagatccagttcgatgtaacccactcgtgcacccaactgatcttcagcatcttttactttcaccagcgtttctgggtgagcaaaaacaggaaggcaaaatgccgcaaaaaagggaataagggcgacacggaaatgttgaatactcatactcttcctttttcaatattattgaagcatttatcagggttattgtctcatgagcggatacatatttgaatgtatttagaaaaataaacaaataggggttccgcgcacatttccccgaaaagtgccacctgacgtctaagaaaccattattatcatgacattaacctataaaaataggcgtatcacgaggccctttcgtctcgcgcgtttcggtgatgacggtgaaaacctctgacacatgcagctcccggagacggtcacagcttgtctgtaagcggatgccgggagcagacaagcccgtcagggcgcgtcagcgggtgttggcgggtgtcggggctggcttaactatgcggcatcagagcagattgtactgagagtgcaccatatgcggtgtgaaataccgcacagatgcgtaaggagaaaataccgcatcaggcgccattcgccattcaggctgcgcaactgttgggaagggcgatcggtgcgggcctcttcgctattacgccagctggcgaaagggggatgtgctgcaaggcgattaagttgggtaacgccagggttttcccagtcacgacgttgtaaaacgacggccagt

SEQ ID NO: 363 - protein, 597 aa, Artificial Sequence
  Description of Artificial Sequence: Synthetic polypeptide
MNSELFSWGTRVPVSTALRGKSDLELSKEIQDSLSEVKWNMFGLEFFLVLGALLFLFTCYQVIKIGLKILEEIQDKLSEVKRGERVGAKRKYGTQNKYTGLSKGLEPEEKLRLGRNTWREIRRKRGKREKKKDQLAEVSRRYSSLDELRKPALSSSEADEEFSSEETDWEEEAAHYQPANWSRKKPKAAGEGQFADWPQGSRLQGPPYAESPPCVVRQQCAERQCAERQCADSFIPREEQRKIQQAFPVFEGAEGGRVHAPVEYLQIKEIAESVRKYGTNANFTLVQLDRLAGMALTPADWQTVVKAALPSMGKYMEWRALWHEAAQAQARANAAALTPEQRDWTFDLLTGQGAYSADQTNYHWGAYAQISSTAIRAWKALSRAGETTGQLTKIIQGPQESFSDFVARMTEAAERIFGESEQAAPLIEQLIYEQATKECRAAIAPRKNKGLQDWLRVCRELGGPLSNAGLAAAILQSQNRSMGRNNQRTCFNCGKPGHFKKDCRAPDKQGGTLTLCSKCGKGYHRADQCRSVRDIKGRVLPPPDSQSADVPKNGSSGPRSQGPQRYGNRFVRTQEAVREATQEDPQGWTCVPPPTSY

SEQ ID NO: 364 - protein, 258 aa, Artificial Sequence
  Description of Artificial Sequence: Synthetic polypeptide
MPQMSIQPVPVEPIPSLPPGTMGLILGRGSLTLQGLVVHPGVMDCQHSPEIQVLCSSPKGVFSISKGDRIAQLLLLPDNTREKFAGPEIKKMGSSGNDSAYLVVSLNDRPKLRLKINGKEFEGILDTGADKSIISTHWWPKAWPTTESSHSLQGLGYQSCPTISSIALTWESSEGQQGKFIPYVLPLPVNLWGRDIMQHLGLILSNENAPSGGYSAKAKNIMAKMGYKEGKGLGHQEQGRIEPISPNGNQDRQGLGFP

SEQ ID NO: 365 - protein, 895 aa, Artificial Sequence
  Description of Artificial Sequence: Synthetic polypeptide
WKPRQTGSGFSLAAIGAARPIPWKTGDPVWVPQWHLSSEKLEAVIQLVEEQLKLGHIEPSTSPWNTPIFVIKKKSGKWRLLHDLRAINEQMNLFGPVQRGLPVLSALPRGWNLIIIDIKDCFFSIPLCPRDRPRFAFTIPSINHMEPDKRYQWKVLPQGMSNSPTMCQLYVQEALLPVREQFPSLILLLYMDDILLCHKDLTMLQKAYPFLLKTLSQWGLQIATEKVQISDTGQFLGSVVSPDKIVPQKVEIRRDHLHTLNDFQKLLGDINWLRPFLKIPSAELRPLFSILEGDPHISSPRTLTLAANQALQKVEKALQNAQLQRIEDSQPFSLCVFKTAQLPTAVLWQNGPLLWIHPNVSPAKIIDWYPDAIAQLALKGLKAAITHFGQSPYLLIVPYTAAQVQTLAATSNDWAVLVTSFSGKIDNHYPKHPILQFAQNQSVVFPQITVRNPLKNGIVVYTDGSKTGIGAYVANGKVVSKQYNENSPQVVECLVVLEVLKTFLEPLNIVSDSCYVVNAVNLLEVAGVIKPSSRVANIFQQIQLVLLSRRFPVYITHVRAHSGLPGPMALGNNLADKATKVVAAALSSPVEAARNFHNNFHVTAETLRSRFSLTRKEARDIVTQCQSCCEFLPVPHVGINPRGIRPLQVWQMDVTHVSSFGKLQYLHVSIDTCSGIMFASPLTGEKASHVIQHCLEAWSAWGKPRLLKTDNGPAYTSQKFQQFCRQMDVTHLTGLPYNPQGQGIVERAHRTLKTYLIKQKRGTFEETVPRAPRVSVSMALFTLNFLNIDAHGHTAAERHCTEPDRPNEMVKWKNVLDNKWYGPDPILIRSRGAICVFPQNENNPFWIPERLTRKIQTDQGNTNVPRLGDVQGVNNKKRAALGDNVDISTPNDGDV

SEQ ID NO: 366 - DNA, 7478 bp, Artificial Sequence
  Description of Artificial Sequence: Synthetic polynucleotide
tgtagtctcccctcccccagcctgaaacctgcttgctcggggtggagcttcctgctcattcgttctgccacgcccactgctggaacctgcggagccacacccgtgcacctttctactggaccagagattattcggcgggaatcgggtcccctcccccttccttcataactggtgtcgcaacaataaaatttgagctttgatcagtatgaaattgccttagctccgtttcttcttttgccccgtctagattcctctcttacagctcgagcggccttctcagtcgaaccgttcacgttgcgagctgctggcggccgcaacattttggcgccggaactgggacctgaagaatggcagagagatgctaagaggaacgctgcattggagctccacaggaaaggatcttcgtatcggacatcggaacaacggacaggtacacatgctagcgctagcttaaaatttcagttttgtaaagtgttgctaaggatgcggtaggatacgaattaagcttgaatcagtgctaacccaacgctggttctgcttgggtcagcagcgtgttaatcggaactagaaacggaaacaggcaggttagccgcagctttttaggaagctgcttaggtggaagaagaaagggtttaaagtcatggatcaggcggttgccaatagttttcaggagttgtttcaggccagaggagtaaggctcgaagtacaattagtaaaaaattttttaggtaagatagatagctgttgcccatggttcaaggaagaagaaacactagattgtggaacctgggagaaagttggtgaggccttaaaaatcactcaggcagataattttaccctaggcctctgggcgctcgtaaatgatgcaataaaagatgccacttccccagggctaagttgcccccaggcggagcttgtggtatctcaggaggagtgcctgtcagagagggcctcctcagaaaaagatcttcttaactcaaaaattgataaatgtggaaactcggatgaaaaactgatttttaacaaaaatcactcagatagaggagctgcccattaccttaatgagaattggtcctcttgtgaatctcccgctccacctgtagtccccacttcgggaggtgccactcatagggacacacgactaagcgagttagagtttgagattaagcttcagaggctgactaatgagcttcgggaactaaaaaagatgtcagaagcggagaagagtaactcttctgtagttcaccaggtgccgctagaaaaggttgtgagtcaggctcgtgggaaaggacagaatatgtctaatacgctagcctttccggtggtcgaggtagttgatcaacaagatactaggggcagacattaccagaccttagatttcaagttgataaaagagttaaaggcggctgttgtgcaatatggcccttcagccccgttcactcaagcattactggacacagttgtggagtcacacttaacccctttagattggaagactctttctaaggctaccctgtcaggaggagattttttgctttgggattctgaatggcgagacgccagtaaaaaaactgctgcttctaacgctcaggctggtaactcagactgggatagcaacatgcttttaggagagggcccttatgagggacagacaaatcagattgattttcccgttgcagtgtacgcgcaaattgcgacggccgcacgccgtgcttggggaaggttgccagtcaaaggagagattggtggaagtttagctagcattcggcagagttctgatgaaccatatcaggattttgtggacaggcttttgatttcagctagtagaattcttggaagtccggacacgggaagtcctttcgttatgcaattggcttatgagaatgctaatgcaatttgccgagctgcgattcaaccgcataagggaacgacagatttggcgggatatgtccgcctttgcgcagacatcgggccttcctgcgagaccttgcagggaacccacgcgcaggcaatgttctcaaggaaacgagggaaaaatgtatgctttaagtgtggaggtttagatcattttagaattgattgtcctcagaacaagggtgccgaggttagacaaacaggccgtggcccaggaatatgtccccggtgtggaaagggccgccactgggcgaaagattgtaagcataaaacgagggttttgagccgcccggtgccgggaaacgaggaaaggggtcagccccaggccccgagttactcaaagaagacagcttatggggctataaatctgctgcccagccaacaagatcagttcttgagcttgtcaggtcaaacccaggaaatgcaagactggacctctgttccactgtccatgtagcattaaccccagaagtgggagtccaaactctgcctaccggagtttttggaccactacctgtaggaacctgtggttttctcttaggacgaagcagttctattgtagaaggcctgcagatttatccaggtgttataagtaatgattatgagggagaaattaaaatcatagccgcttgccctcgtggtgctataactatacccgctaatcagaaaattgctcaacttactttgatccctttgcgctggtcactatctaaattctttgaaaatgaagaaggacagaataactttgactcccttggcgtaaattgggtgaaatctatcactaatcagagacctaaccttaaattgattcttgatggaaaaagctttgaaggattaatagataccggggccgatgtaacgataattagagggcaggactggccctcaaactggcccctgtctgtttccttgactcaccttcaaggaattggttatgccagtaacccaaaacgtagttccaaattgctaacctggagagatgaggatggaaaatcaggaaatattcagccgtatgttatgccaaatttgcctgtaaccctgtggggaagagatctgttgtcacagatgggcgttatcctgtgcagttctaaggagatggtgactgaacagacgttcaggcagggacccctgcctgatcgtggactaataaagaagggacagaaaattaagacctttgaggatcttaaaccccactctaacgtgagaggtttacagtattttcagtagcggccactgtcttgcctgcatcccacgccgaaaaaattcaatggcgtaatgatattccggtatgggtagatcagtggtccttgcctaaagagaaaatagaggccgcttctttgctagtgcaggagcagttagaagcaggacatttggtggagtctcactctccctggaatacacccattttcattatcaggaagaaatcgggaaaatggagactattgcaggatttaagaaaggttaatgaaaccatggtacttatgggaactttacaaccggggcttccctccccagtagccattcctaagggatattataagattgttatagatttgaaagattgtttctttaccatccctttgcatccaaaggattgtgagagatttgcttttagtgttccttctgtaaatttcaaggaacccatgaaaagatatcattggacagttctcccgcagggcatggctaatagtcccaccttatgtcaaaggtttgtggcaaaggcaattcagcctgttagacaacaatggccaaatatttacatcatccatttcacagatgatgtcctgatggcgggaaaggacccccaagatttgcttttgtgttatggagacttacaaaaggccctggctgataagggattacaaattgcttctgaaaagatacaaactcaggatccttataattatttgggttttagactcactgatcaagctgtttttccccagaaaattgttattcgtagagataacttaaggaccttaaatgattttcaaaaattgttaggtgatataaattggcttcgcccttatctaaagcttactacaggggagttgaaacctttatttgatattcttaaagggagttctgatcccacttcccctagatccctaacctcagaagggttgctggccttacagctagtggaaaaggctattgaagaacagtttgtcacttacatagattactccctgccgctgcacctgttaatttttaatacgactcatgtgcctacgggattgctatggcaaaaatttcctataatgtggatacattcgaggatttctcccaaacgtaatatcttgccatatcacgaagcagtggctcagatgattatcactggaagaaggcaggcattgacttattttggaaaggagccagatatcattgtccagccttacagcgtgagtcaggacacttggctgaaacagcatagtacagattggttgcttgcacaattagggtttgaaggaactctagatagccactacccccaagataggttgataaaattcttaaatgtgcatgatatgatatttcctaagatgacttccttacagcctttaaataatgctctgttgatttttactgatggctcctctaaagggcgagctggatatcttattagtaatcaacaggttatcgtagagactcctggtctctcggctcagctcgccgaattaacagcagtactgaaggtttttcagtctgtgcatgaggcttttaatatttttactgacagtttatatgttgctcagtcagtacccttactggaaacctgtggtacgtttaacttcaatacgccgtcaggatctttattttcagaattacaaaacatcattctcgcccggaaaaatccgttttatattggccacatacggtctcactctggtcttcctggacctctggcagagggtaatgatcgcattgacagagctctaataggagaagccttagtttcagatcgggttgctttggcccaacgtgatcacgaaaggtttcatctttctagccataccctaaggctccgacataagatcacaaaggagcaagcgagaatgatcgtaaaacaatgtcctaaatgtattactttatctccagtgcctcatctaggagttaatcctagaggccttatgcctaatcatatttggcaaatggatataacccattatgcagaatttggaaaactaaaatatatacatgtttgcattgatacttgttcaggatttctttttgcttctctgcatacaggagaagcttcaaaaaacgtaattgatcattgcctacaagcatttaatgccatgggattgcctaaacttattaagacagacaatgggccatcttattccagtaaaaactttatttcattctgtaaagaattcggtattaatcataaaactggaattccttacaaccccatgggacaaggaatagttgaacgtgctcatcgcaccttaaagaattggctttttaagacaaaagagggtcagctatatcccccaaggtcaccaaaggcccaccttgccttcactttatttgtcctaaatttcttgcacaccgatatcaagggccagtctgcagcggatcgccactggcatccagttacttctaattcttatgcattggtaaaatggaaggaccccctgactaatgaatggaagggtccagatccagttctaatttggggtaggggctcagtttgtgttttttcacgagatgaagatggagcgcggtggctgccagagagattaattcgtcagatgaacacagattctgactcttctggtaagtatcattctaaagactaaaattccttttgtgcttaaaattcagctgagagcaacagctctcaaagctgtttgtgttctccagctactctctgaaccagctcccgacaggaggccggagactagcctcagctttacaatttgcatttaaataaagtacctagacttccccgaaagaagttctgctttcctactttctcactgtctttcaagattttgtctttcaagcaggtaaatcaacattcccgaggcggaccagcggatgtgcatccccgcccccctagagcacacaggcggcagctgttacccccagtctcaggacatttccagcatgtggctttcagtctgagttaaaaatttaggtttacctagagggctagaagagtagatttttctatatcaataaagattggtttttattttggtagacaggcttagccccttagctgacctctggcttttcacccttgctgttactgcaaggtgtccttagctcaataggctgtggaaaaaacagggatgaggaggaacgacttccagctcctattttacccacaaatcgtggtgttattaacgacataattcttgcttaggctttgctaattctgaggttgataattctcctttaggagctgcacagcactcagaactgtgcatactggtttgtgattgtacaaattcagtatgggcaccgcttggtgcagagatacttactgcaagggaaggtccggcttgaccatttctgagtttcctgtgagataaacccggtttgaaagaggttggtaccaaattttggttaaaaataaaaaatattctccggctctacctcgcctccccaaaaggtaccgagagccacatgtgtgggttttacccacgggaggaatcgggtccatgtccacccaagccaaggttaaaagcccactcatctacggatgagaaaatcatttgatcacctcagttaagcgttgccttatttaacttaattaataggggggagagagattggagacgtactattgaaagggcaagcctttcactgcctcccacccaaataaaaaagccaattggccttgtactacaagagccggtcactccttctccctgtttcccacctatcttccaaaaatgcggaggaattcaacttagtgctattttcacatcgttcagtcaaacttagccagagttccaacgccctacttaaaattcaactagaaagttacctaccaagtactaattagcattataaagtcagagtctgcagctccaggcctttcagttgtttactagaaaggacagtcttaagccagatacagtttaccataagaaaggttaaagaatcccagtgaagcaagttttttctttagccctagattccaggcagaactattgagcatagataattttcccccctcaggccagctttttccttttttttattttgttaataatagggaggagatgtagtctcccctcccccagcctgaaacctgcttgctcggggtggagcttcctgctcattcgttctgccacgcccactgctggaacctgcggagccacacccgtgcacctttctactggaccagagattattcggcgggaatcgggtcccctccccccttccttcataactggtgtcgcaacaataaaatttgagctttgatcagtatgaaattgccttagctccgtttcttcttttgccccgtctagattcctctcttacagctcgagcggccttctcagtcgaaccgttcacgttgcgagctgctggcggccgcaaca

SEQ ID NO: 367 - DNA, 7477 bp, Artificial Sequence
  Description of Artificial Sequence: Synthetic polynucleotide
tgtagtctcccctcccccagcctgaaacctgcttgctcggggtggagcttcctgctcattcgttctgccacgcccactgctggaacctgcggagccacacccgtgcacctttctactggaccagagattattcggcgggaatcgggtcccctcccccttccttcataactggtgtcgcaacaataaaatttgagctttgatcagtatgaaattgccttagctccgtttcttcttttgccccgtctagattcctctcttacagctcgagcggccttctcagtcgaaccgttcacgttgcgagctgctggcggccgcaacattttggcgccggaactgggacctgaagaatggcagagagatgctaagaggaacgctgcattggagctccacaggaaaggatcttcgtatcggacatcggagcaacggacaggtacacatgctagcgctagcttaaaatttcagttttgtaaagtgttgctaaggatgcggtaggatacgaattaagcttgaatcagtgctaacccaacgctggttctgcttgggtcagcagcgtgttaatcggaactagaaacggaaacaggcaggttagccgcagctttttaggaagctgcttaggtggaagaagaaagggtttaaagtcatggatcaggcggttgccaatagttttcaggagttgtttcaggccagaggagtaaggctcgaagtacaattagtaaaaaattttttaggtaagatagatagctgttgcccatggttcaaggaagaagaaacactagattgtggaacctgggagaaagttggtgaggccttaaaaatcactcaggcagataattttaccctaggcctctgggcgctcgtaaatgatgcaataaaagatgccacttccccagggctaagttgcccccaggcggagcttgtggtatctcaggaggagtgcctgtcagagagggcctcctcagaaaaagatcttcttaactcaaaaattgataaatgtggaaactcggatgaaaaactgatttttaacaaaaatcactcagatagaggagctgcccattaccttaatgagaattggtcctcttgtgaatctcccgctccacctgtagtccccacttcgggaggtgccactcatagggacacacgactaagcgagttagagtttgagattaagcttcagaggctgactaatgagcttcgggaactaaaaaagatgtcagaagcggagaagagtaactcttctgtagttcaccaggtgccgctagaaaaggttgtgagtcaggctcgtgggaaaggacagaatatgtctaatacgctagcctttccggtggtcgaggtagttgatcaacaagatactaggggcagacattaccagaccttagatttcaagttgataaaagagttaaaggcggctgttgtgcaatatggcccttcagccccgttcactcaagcattactggacacagttgtggagtcacacttaacccctttagattggaagactctttctaaggctaccctgtcaggaggagattttttgctttgggattctgaatggcgagacgccagtaaaaaaactgctgcttctaacgctcaggctggtaactcagactgggatagcaacatgcttttaggagagggcccttatgagggacagacaaatcagattgattttcccgttgcagtgtacgcgcaaattgcgacggccgcacgccgtgcttggggaaggttgccagtcaaaggagagattggtggaagtttagctagcattcggcagagttctgatgaaccatatcaggattttgtggacaggcttttgatttcagctagtagaattcttggaagtccggacacgggaagtcctttcgttatgcaattggcttatgagaatgctaatgcaatttgccgagctgcgattcaaccgcataagggaacgacagatttggcgggatatgtccgcctttgcgcagacatcgggccttcctgcgagaccttgcagggaacccacgcgcaggcaatgttctcaaggaaacgagggaaaaatgtatgctttaagtgtggaggtttagatcattttagaattgattgtcctcagaacaagggtgccgaggttagacaaacaggccgtggcccaggaatatgtccccggtgtggaaagggccgccactgggcgaaagattgtaagcataaaacgagggttttgagccgcccggtgccgggaaacgaggaaaggggtcagccccaggccccgagttactcaaagaagacagcttatggggctataaatctgctgcccagccaacaagatcagttcttgagcttgtcaggtcaaacccaggaaatgcaagactggacctctgttccactgtccatgtagcattaaccccagaagtgggagtccaaactctgcctaccggagtttttggaccactacctgtaggaacctgtggttttctcttaggacgaagcagttctattgtagaaggcctgcagatttatccaggtgttataagtaatgattatgagggagaaattaaaatcatagccgcttgccctcgtggtgctataactatacccgctaatcagaaaattgctcaacttactttgatccctttgcgctggtcactatctaaattctttgaaaatgaagaaggacagaataactttgactcccttggcgtaaattgggtgaaatctatcactaatcagagacctaaccttaaattgattcttgatggaaaaagctttgaaggattaatagataccggggccgatgtaacgataattagagggcaggactggccctcaaactggcccctgtctgtttccttgactcaccttcaaggaattggttatgccagtaacccaaaacgtagttccaaattgctaacctggagagatgaggatggaaaatcaggaaatattcagccgtatgttatgccaaatttgcctgtaaccctgtggggaagagatctgttgtcacagatgggcgttatcctgtgcagttctaaggagatggtgactgaacagacgttcaggcagggacccctgcctgatcgtggactaataaagaagggacagaaaattaagacctttgaggatcttaaaccccactctaacgtgagaggtttacagtattttcagtagcggccactgtcttgcctgcatcccacgccgaaaaaattcaatggcgtaatgatattccggtatgggtagatcagtggtccttgcctaaagagaaaatagaggccgcttctttgctagtgcaggagcagttagaagcaggacatttggtggagtctcactctccctggaatacacccattttcattatcaggaagaaatcgggaaaatggagactattgcaggatttaagaaaggttaatgaaaccatggtacttatgggaactttacaaccggggcttccctccccagtagccattcctaagggatattataagattgttatagatttgaaagattgtttctttaccatccctttgcatccaaaggattgtgagagatttgcttttagtgttccttctgtaaatttcaaggaacccatgaaaagatatcattggacagttctcccgcagggcatggctaatagtcccaccttatgtcaaaggtttgtggcaaaggcaattcagcctgttagacaacaatggccaaatatttacatcatccatttcacagatgatgtcctgatggcgggaaaggacccccaagatttgcttttgtgttatggagacttacaaaaggccctggctgataagggattacaaattgcttctgaaaagatacaaactcaggatccttataattatttgggttttagactcactgatcaagctgtttttccccagaaaattgttattcgtagagataacttaaggaccttaaatgattttcaaaaattgttaggtgatataaattggcttcgcccttatctaaagcttactacaggggagttgaaacctttatttgatattcttaaagggagttctgatcccacttcccctagatccctaacctcagaagggttgctggccttacagctagtggaaaaggctattgaagaacagtttgtcacttacatagattactccctgccgctgcacctgttaatttttaatacgactcatgtgcctacgggattgctatggcaaaaatttcctataatgtggatacattcgaggatttctcccaaacgtaatatcttgccatatcacgaagcagtggctcagatgattatcactggaagaaggcaggcattgacttattttggaaaggagccagatatcattgtccagccttacagcgtgagtcaggacacttggctgaaacagcatagtacagattggttgcttgcacaattagggtttgaaggaactctagatagccactacccccaagataggttgataaaattcttaaatgtgcatgatatgatatttcctaagatgacttccttacagcctttaaataatgctctgttgatttttactgatggctcctctaaagggcgagctggatatcttattagtaatcaacaggttatcgtagagactcctggtctctcggctcagctcgccgaattaacagcagtactgaaggtttttcagtctgtgcatgaggcttttaatatttttactgacagtttatatgttgctcagtcagtacccttactggaaacctgtggtacgtttaacttcaatacgccgtcaggatctttattttcagaattacaaaacatcattctcgcccggaaaaatccgttttatattggccacatacggtctcactctggtcttcctggacctctggcagagggtaatgatcgcattgacagagctctaataggagaagccttagtttcagatcgggttgctttggcccaacgtgatcacgaaaggtttcatctttctagccataccctaaggctccgacataagatcacaaaggagcaagcgagaatgatcgtaaaacaatgtcctaaatgtattactttatctccagtgcctcatctaggagttaatcctagaggccttatgcctaatcatatttggcaaatggatataacccattatgcagaatttggaaaactaaaatatatacatgtttgcattgatacttgttcaggatttctttttgcttctctgcatacaggagaagcttcaaaaaacgtaattgatcattgcctacaagcatttaatgccatgggattgcctaaacttattaagacagacaatgggccatcttattccagtaaaaactttatttcattctgtaaagaattcggtattaatcataaaactggaattccttacaaccccatgggacaaggaatagttgaacgtgctcatcgcaccttaaagaattggctttttaagacaaaagagggtcagctatatcccccaaggtcaccaaaggcccaccttgccttcactttatttgtcctaaatttcttgcacaccgatatcaagggccagtctgcagcggatcgccactggcatccagttacttctaattcttatgcattggtaaaatggaaggaccccctgactaatgaatggaagggtccagatccagttctaatttggggtaggggctcagtttgtgttttttcacgagatgaagatggagcgcggtggctgccagagagattaattcgtcagatgaacacagattctgactcttctggtaagtatcattctaaagactaaaattccttttgtgcttaaaattcagctgagagcaacagctctcaaagctgtttgtgttctccagctactctctgaaccagctcccgacaggaggccggagactagcctcagctttacaatttgcatttaaataaagtacctagacttccccgaaagaagttctgctttcctactttctcactgtctttcaagattttgtctttcaagcaggtaaatcaacattcccgaggcggaccagcggatgtgcatccccgcccccctagagcacacaggcggcagctgttacccccagtctcaggacatttccagcatgtggctttcagtctgagttaaaaatttaggtttacctagagggctagaagagtagatttttctatatcaataaagattggtttttattttggtagacaggcttagccccttagctgacctctggcttttcacccttgctgttactgcaaggtgtccttagctcaataggctgtggaaaaaacagggatgaggaggaacgacttccagctcctattttacccacaaatcgtggtgttattaacgacataattcttgcttaggctttgctaattctgaggttgataattctcctttaggagctgcacagcactcagaactgtgcatactggtttgtgattgtacaaattcagtatgggcaccgcttggtgcagagatacttactgcaagggaaggtccggcttgaccatttctgagtttcctgtgagataaacccggtttgaaagaggttggtaccaaattttggttaaaaataaaaaatattctccggctctacctcgcctccccaaaaggtaccgagagccacatgtgtgggttttacccacgggaggaatcgggtccatgtccacccaagccaaggttaaaagcccactcatctacggatgagaaaatcatttgatcacctcagttaagcgttgccttatttaacttaattaataggggggagagagattggagacgtactattgaaagggcaagcctttcactgcctcccacccaaataaaaaagccaattggccttgtactacaagagccggtcactccttctccctgtttcccacctatcttccaaaaatgcggaggaattcaacttagtgctattttcacatcgttcagtcaaacttagccagagttccaacgccctacttaaaattcaactagaaagttacctaccaagtactaattagcattataaagtcagagtctgcagctccaggcctttcagttgtttactagaaaggacagtcttaagccagatacagtttaccataagaaaggttaaagaatcccagtgaagcaagttttttctttagccctagattccaggcagaactattgagcatagataattttcccccctcaggccagctttttccttttttttattttgttaataatagggaggagatgtagtctcccctcccccagcctgaaacctgcttgctcggggtggagcttcctgctcattcgttctgccacgcccactgctggaacctgcggagccacacccgtgcacctttctactggaccagagattattcggcgggaatcgggtcccctcccccttccttcataactggtgtcgcaacaataaaatttgagctttgatcagtatgaaattgccttagctccgtttcttcttttgccccgtctagattcctctcttacagctcgagcggccttctcagtcgaaccgttcacgttgcgagctgctggcggccgcaaca

SEQ ID NO: 368 - DNA, 7486 bp, Artificial Sequence
  Description of Artificial Sequence: Synthetic polynucleotide
tgtagtctcccctcccccagcctgaaacctgcttgctcagggtggagcttcctgctcattcgttctgccacgcccactgctggaacctgaggagccacacacgtgcacctttctactggacccgagattattcggcgggaatcgggtcccctcccccttccttcataactagtgtcccaacaataaaatttgagctttgatcagaatgaatttgtcttagctccgtttcttctttcgccccgtctagattcctctcttacagctcgagtggccttctcagtcgaaccgttcacgttgcgagctgctggcggccgcaacattttggcgccagaactgggacctgaagaatggcagagagatgctaagaggaacgctgcattggagctccacaggaaaggatcttcgtatcggacatcggagcaacggaccgtatcagacatcggagcaacggacaggtacacatgctagcgctagcttaaaatttcagttttgtaaagtgttgctgaggatgcggtaggatacgaattaagcttgaatcagtgctaacccaacgctggttctgcttgggtcagcagcgtgttaatcggaactagaaacggaaacaggcaggttagccgcagctttttaggaagctgcttaggtggaagaagaaagggtttaaagtcatggatcaggcggttgcccatagttttcaggagttgtttcaggccagaggagtaaggcttgaagtacaattagtaaaaaattttttaggtaagatagatagctgttgcccatggttcaaggaagaagaaacactagattgtggaacctgggagaaagttggtgaggccttaaaaatcactcaggcagataattttaccctaggcctctgggcgctcgtaaatgatgcaataaaagatgccacttccccagggctaagttgcccccaggcggagcttgtggtatctcaggaggagtgcctgtcagagagggcctcctcagaaaaagatcttcttaactcaaaaactgataaatgtggaaactcggatgaaaaactgatttttaacaaaaatcactcagatagaggagctgcccattaccttaatgagaattggtcctcttgtgaatctcccgctccacctgtagtccccacttcaggaggtgccactcatagggacacacgactaagcgagttagagtttgagattaagcttcagaggctgactaatgagcttcgggaactaaaaaagatgtcagaagcggagaagagtaactcttctgtagttcaccaggtgccgctagaaaaggttgtgagtcaggctcgtgggaaaggacagaatatatctaatacgctagcctttcctgtggtcgaggtaattgatcagcaagatactaggggcagacattaccagaccttagatttcaagttgataaaagagttaaaggcggctgttgtgcaatatggcccttcagccccattcactcaagcattactggacacagttgtggagtcacacttaacccctttagattggaagactctttctaaggctaccctgtcaggaggagattttttgctttgggattctgaatggcgagacgccagtaagaaaactgctgcttctaacgctcaggctggtaattcagactgggatagcaacatgcttttaggagagggcccttatgagggacagacaaatcagattgattttcccgttgcagtgtacgcgcaaattgcgacggccgcacgccgtgcttggggaaggttgccagtcaaaggagagattggtggaagtttagctagcattcggcagagttctgatgaaccatatcaggattttgtggacaggctattgatttcagctagtagaatccttgggaatccggacacgggaagtcctttcgttatgcaattggcttatgagaatgctaatgcaatttgccgagctgcgattcaaccgcataagggaacgacagatttggcgggatatgtccgcctttgcgcagacatcgggccttcctgcgagaccttgcagggaacccacgtgcaggcaatgttctcaaggaaacgagggaaaaatgtatgctttaagtgtggaagtttagatcattttagaattgattgtcctcagaacaagggtgccgaggttagacaaacaggccgtgccccaggaatatgtccccggtgtgggaagggccgccactgggcaaaagattgtaagcataaaacgagggttttgagccgcccggtgccgggaaacgaggaaaggggtcagccccaggccccgagttactcaaagaagacagcttatggggctataaatctgctgcccagccaacaagatcagttcttgagcttgtcaggtcaaacccaggaaatgcaagactggacctctgttccactgtccatgcagcattaaccccagaagtgggagtccaaactctgcctaccagagtctttggaccactacctgtaggaacctgtggttttctcttaggacgaagcagttctattgtagaaggcctgcagatttatccaggtgttataagtaatgattatgagggagaaattaaaatcatagccgcttgccctcgtggtgctataactatacccgctaatcagaaaattgctcaacttactttgatccctttgcgctggtcactatctaaattctttgaaaatgaagaaggacagaataactttgactcctctggcgtaaattgggtgaaatctatcactaatcagagacctaaccttaaattgattcttgatggaaaaagctttgaaggattaatagataccggggccgatgtaacgattattagagggcaggactggccctcaaactggcccctgtctgtttccttgactcaccttcaaggaattggttatgccagtaacccaaaacgtagttccaaattgctaacctggagagatgaggatggaaaatcaggaaatattcagccgtatgttatgccaaatttgcctgtgaccctgtggggaagagatctgttgtcacagatgggcgttatcctgtgcagttctaaggagatggtgactgaacagacattcaggcagggactcctgcctgatcgtggactaataaagaagggacagaaaattaagacttttgaggattttaaaccccactctaacgtgagaggtttaaagtattttcagtagcggccactgtcttgcctgcatcccacgccgaaaaaattcaatggcgtaatgatattccggtgtgggtagatcagtggtctttacctaaagagaaaatagaggccgcttctttgctagtgcaggagcagttagaagcaggacatttggtggagtctcactctccctggaatacacccgttttcattatcaggaagaaatcgggaaaatggagactgttgcaagatttaagaaaggttaatgaaaccatggtacttatgggaactttacaaccggggctcccctccccagtagccattcctaagggatattataagattgttatagatttgaaagattgtttctttaccatccctttgcatccaaaggattgtgagagatttgcttttagtgttccttctgtaaatttcaaggaacccatgaaaagatatcaatggacagttctcccgcagggcatggctaatagtcccaccttatgtcaaaggtttgtggcaaaggcaattcagcctgttagacaacaatggccaaatatttacatcattcatttcacagatgatgtcttgatggtgggaaaggacccccaagatttgcttttgtgttatggagacttacgaaaggccctggctgataagggattacaaattgcttctgaaaagatacaaactcaggatccttataattatttgggttttagactcactgatcaagctgtttttccccagaaaattgttattcgtagagataacttaaggaccttaaatgattttcaaaaattgttaggtgacataaattggcttcgcccctatctaaagcttactacaggggagttgaaacctttatttgatattcttaaagggagttctgatcccacttcccctagatccctaacctcagaaggattactggccttacagctagtggaaaaggctattgaagaacagtttgtcacttacatagattactccctgccgctgcacctgttaatttttaatacgactcatgtgcctacgggattgctatggcaaaaatttcctataatgtggatacattcgaggatttctcccaaacgtaatatcttgccatatcacgaagcagtggctcagatgattatcactggaagaaagcaggcattgacttattttggaaaggagccagatatcattgtccagccttacagcgtgagtcaggacacttggctgaaacagcatagtacagattggttgcttgcacaattagggtttgaaggaactatagatagccactacccccaagataggttgataaaattcttaaatgtgcatgatatgatatttcctaagatgacttccttacagcctttaaataatgctctattgatttttactgatggctcctctaaagggcgagctggatatcttattagtaatcaacaggttatcgtagagactcctggtctctcggctcagctcgccgaattaacagcagtactgaaggtttttcagtctgtacatgaggcttttaatatttttactgacagtttatatgttgctcagtcagtacccttattggaaacctgtggtacgtttaacttcaatacgccgtcaggatctttattttcagaattacaaaacatcattctcgcccggaaaaatccgttttatattggccacatacggtctcactctggtcttcctggacctctggcagagggtaatgatcgcattgacagagctctaataggagaagccttagtttcagatcgggttgctttggcccaacgtgatcttgaaaggtttcatctttctagccataccctaaggctccggcataagatcacaaaggagcaagcgagaatgatcctaaaacaatgtcctaaatgtattactttatctccagtgccgcatctaggagttaatcctagaggccttatgcctaatcatatttggcaaatggatataacccattatgcagaatttggaaaactaaaatatatacatgtttgcattgatacttgttcaggatttctttttgcttctctgcatacaggagaagcttcaaaaaacgtaattgatcattgcctacaagcatttaatgccatgggattgcctaaacttattaagacagacaatgggccatcttattccagtaaaaactttatttcattctgtaaagaattcggtattaaacataaaactggaattccttacaaccccatgggacagggaatagttgaacgtgctcatcgcaccttaaagaattggctctttaagacaaaagaggggcagctatatcccccaaggtcaccaaaggcccaccttgccttcaccttatttgtcctaaatttcttgcacaccgatatcaagggccagtctgcagcggatcgccactggcatccagttacttctaattcttatgcattggtaaaatggaaggaccccctgactaatgaatggaagggtccagatccagttctaatttggggtaggggctcagtttgtgttttttcacgagatgaagatagagcgcggtggctgccagagagattaattcgtcagatgaacacagattctgactcttctggtaagtatcattctaaagactaaaattccttttgtgcttaaaattcagctgagagcaacagctctcaaagctgttctccagctactctctgagccagctcccgacaggaggccggagactagcctcagctttacaatttgcatttgaataaagtacctagacttcccctaaagaagttctgttttcctactttctcactgtctttcaagattttgtctttcaagcaggtaaatcaacattctcgaagcggaccagcggatgtgcatccccgcccccctagagcatgcaggtggcagctgttatccccagtctcaggacatttccagcacatggttttcagtctgagttaaaaatttaggtttacctagagggctagaagagtagatatttctatattaataaagattggtttttattttgatagacaggcttagccccttagctgacctctggcttttcacccttgctgttactgcaaggtgtccttagctcaataggctgtggaaaaaacagggatgaggaggaacgacttccagctcctattttagccacaaatcgtggtgttactaatgacataattcttgcttaggctttgctaattctgaggttgataattctcctttaggagctgcacagcactcagaactgtgcatactggtttgtgattgtacaaattcagtatgggcatcgcttggtgcagaggtactgcaagggaaggtccggcttgaccatttctgagtttcctgtgagataaacccggtttaaaagaggttggtatcatattttggttaaaaataaaaaatattttccggctctaccttgcctccccaaaagatacccagagccacatgtgtgggttttaccagtacccacgggaggaatcgggtccatgtccacccaagccaaggttaaaagcccactcatctacggatgagaaaatcatttgatcacctcagttaagcgttgccttatttaacttaattaataggggggagagagattggagacgtactattaaaagggcaagcccttcactgcctcccacccaaataaaagagccggtcgaacgccttctccctgtttcccacctatcatccaaaaatgcggaggaatatcaacttagtgttattttcccatttgttcagtcaaacttagccagagttccaacgccctacttaaaattcaactagaaagttacctaccaagtactaattagcattataaagtcagagtctgcagctccaggcctttcagttagttgtttactagaaaggacagtcttaagccagatacagtttaccataagaaaagttaaagaatcccagtgaagcaagttttttctttagccctagattctaggcagaactattgagcatagataatttttcccccctcaggccagctttttctttttttttaaattttgttaataaaagggaggagatgtagtctccccctcccccagcctgaaacctgcttgctcagggtggagcttcctgctcattcattctgccacgcccactgctggaacctgaggagccacacacgtgcacctttctactggacccgagattattcggcgggaatcgggtcccctcccccttccttcataactagtgtcccaacaataaaatttgagctttgatcagaatgaatttgtcttagctccgtttcttctttcgccccgtctagattcctctcttacagctcgagtggccttctcagtcgaaccgttcacgttgcgagctgctggcggccgcaaca

SEQ ID NO: 369 - DNA, 7454 bp, Artificial Sequence
  Description of Artificial Sequence: Synthetic polynucleotide
tgtagtctcccctcccctagcctgaaacctgcttgctcggggtggagcttcctgctcattcgttctgccatgcccactgctggaacctgaggagccacacacgtgcacctttctactgaaccagagattattcggcgggaatcgggtcccctcccccttccttcataactaatgtcgcaacaataaaatttgagctttgatcagaatgaaattgtcttagctccgttttttcttccgccccgtctagattcctctcttacagctcgagcggccttctcagtcgaaccgttcacgttgcgagctgctggcggccgcaacattttggcgcccgaacagggacctgaagaatggcagagagatgctaagaggaacgctgcattggagctccacaggaaaggatcttcgtatcggacatcggagcaacggacaggtacacatgctagcgctagcttaaaatttcagttttgtaaagtgttgctgaggatgcggtaggatacgaattaagcttgaatcagtgctaacccaacgctggttctgcttgggtcagcagcgtgttaatcggaactagaaacggaaacaggcaggttagccgcagctttttagaaagctgcttaggtggaagaagaaagggtttaaagtcatggatcaggcggttgcccatagttttcaggagttgtttcaggccagaggagtaaggcttgaagtacaattagtaaaaaattttttaggtaagatagatagctgttgcccatggttcaaggaagaagaaacactagattgtggaacctgggagaaagttggtgaggccttaaaaatcactcaggcagataattttaccctaggcctctgggcgctcgtaaatgatgcaataaaagatgccacttccccagggctaagttgcccccaggcggagcttgtggtatctcaggaggagtgcctgtcagagagggcctcctcagaaaaagatcttcttaactcaaaaattgataaatgtggaaactcggatgaaaaactgatttttaacaaaaatcactcagatagaggagctgcccattaccttaatgagaattggtcctcttgtgaatctcccgctccacctatagtccccacttcgggaggtgccactcatagggacacacgactaagcgagttagagtttgagattaagcttcagaggctgactaatgagcttcgggaactaaaaaagatgtcagaagcggagaagagtaactcttctgtagttcaccaggtgccgctagaaaaggttgtgagtcaggctcgtgggaaaggacagaatatgtctaatacgctagcctttccggtggtcgaggtagttgatcagcaagatactaggggcagacattaccagaccttagatttcaagttgataaaagagttaaaggcggctgttgtgcaatatggcccttcagccccattcactcaagcattactggacacagttgtggagtcacacttaacccctttagattggaagactctttctaaggctaccctgtcagaaggagattttttgctttgggattctgaatggcgagacgccagtaagaaaactgctgcttctaacgctcaggctggtaattcagattgggatagcaacatgcttttaggagagggcccttatgagggacagacaaatcagattgattttcccgttgcagtgtacgcgcaaattgcgacggccgcacgccgtgcttggggaaggttgccagtcaaaggagagattggtggaagtttagctagcattcggcagagttctgatgaaccatatcaggattttgtggacaggctattgatttcagctagtagaatccttgggaatccggacacgggaagtcctttcgttatgcaattggcttatgagaatgctaatgcaatttgccgagctgcgattcaaccgcataagggaacgacagatttggcaggatatgtccgcctttgtgcagacatcgggccttcctgcgagaccttgcagggaacccacgcgcaggcaatgttctcaaggaaacgagggaaaaatgtatgctttaagtgtggaagtttagatcattttagaattgattgtcctcagaacaagggtgccgaggttagacaaacaggccgtggcccaggaatatgtccccggtgtgggaagggccgccactgggcaaaagattgtaagcataaaacgagggttttgagccgcccggtgccgggaaacgaggaaaggggtcagccccaggccccgagttactcaaagaagacagcttatggggctataaatctgctgcccagccaacaagatcagttcttgagcttgtcaggtcaaacccaggaaatgcaagactggacctctgttccactgtccatgcagcattaaccccagaagtgggagtccaaactctgcctaccggagtttttggaccactacctgtaggaacctgtggttttctcttaggacgaagcagttctattgtagaaggcctgcagatttatccaggtgttataagtaatgattatgagggagaaattaaaatcatagccgcttgccctcgtggtgctataactatacccgctaatcagaaaattgctcaacttactttgatccctttgcgctggtcactatctaaattccttgaaaatgaagaaggacagaataactttgactcctctggtgtaaattgggtgaaatctatcaccaatcagagacctaaccttaaattgattcttgatggaaaaagctttgaaggattaatagataccggggccgatgtaatgatcatcagagggcaggactggccctcaaactggcccctgtctgtttccttgactcaccttcaaggaattggttatgccagtaacccaaaacgtagttccaaattgctaacctggagagatgaggatggaaaatcaggaaatattcagccgtatgttatgccaaatttgcctgtaaccctgtggggaagagatctgttgtcacagatgggcgttatcctgtgcagttctaaggagatggtgactgaacagacgttcaggcagggacccctgcctgatcgtggactaataaagaagggacagaaaattaagacttttgaggatcttaaaccccactctaacgtgagaggtttaaagtattttcagtagcggccgctgtcttgcctgcatcccacgccgaaaaaattcaatggcgtaatgatattccggtgtgggtagatcagtggtctttacctaaagagaaaatagaggccgcttctttgctagtgcaggagcagttagaagcaggacatttggtggagtctcactctccctggaatacacccattttcattatcaggaagaaatcgggaaaatggagactgttgcaagatttaagaaaggttaatgaaaccatggtacttatgggaactttacaaccggggctcccctccccagtagccattcctaagggatattataagattgttatagatttgaaagattgtttctttaccatccctttgcatccaaaggattgtgagagatttgcttttagtgttccttctgtaaatttcaaggaacccatgaaaagatatcattggacagttctcccgcagggcatggctaatagtcccaccttatgtcaaaggtttgtggcaaaggcaattcagcctgttagacaacaatggccaaatatttacatcatccatttcacagatgatgtcttgatggcgggaaaggacccccaagatttgcttttgtgttatggagacttacgaaaggccctggctgataagggattacaaattgcttctgaaaagatacaaactcaggatccttataattatttgggttttagactcactgatcaagatgtttttccccagaaaattgttattcgtagagataacttaaggaccttaaatgattttcaaaaattgttaggtgatataaattggcttcgcccctatctaaagcttactacaggggagttgaaacctttatttgatattcttaaagggagttctgatcccacttcccctagatccctaacctcagaaggattactggccttacagctagtggaaaaggctattgaagaacagtttgtcacttacatagattactccctgccgctgcacctgttaatttttaatacgactcatgtgcctacgggattgctatggcaaaaatttcctataatgtggatacattcgaggatttctcccaaacgtaatatcttgccatatcacgaagcagtggctcagatgattatcactggaagaaggcaggcattgacttattttggaaaggagccagatatcattgtccagccttacaacgtgagtcaggacacttggctgaaacagcatagtacagattggttgcttgcgcaattagggtttgaaggaactctagatagccactacccccaagataggttgataaaattcttaaatgtgcatgatatgatatttcctaagatgacttccttacagcctttaaataatgctctgttgatttttactgatggctcctctaaagggcgagctggatatcttattagtaatcaacaggttatcgtagagactcctggtctctcggctcagctcgccgaattaacagcagtactgaaggtttttcagtctgtgcatgaggcttttaatatttttactgacagtttatatgttgctcagtcagtacccttattggaaacctgtggtacgtttaacttcaatacgccgtcaggatctttattttcagaattacaaaacatcattctcgcccggaaaaatccgttttatattggccacatacggtctcactctggtcttcctggacctctggcagagggtaatgatcgcattgacagagctctaataggagaagccttagtttcagatcgggttgctttggcccaacgtgatcacgaaaggtttcatctttctagccataccctaagactccgacataagatcacaaaggagcaagcgagaatgatcgtaaaacaatgtcctaaatgtattactttatctccagtgccgcatctaggagttaatcctagacgccttatgcctaatcatatttggcaaatggatataacccattatgcagaatttggaaaactaaaatatatacatgtttgcattgatacttgttcaggatttctttttgcttctctgcatacaggagaagcttcaaaaaacgtaattgatcattgcctacaagcatttaatgccatgggattgcctaaacgtattaagacagacaatgggccatcttattccagtaaaaactttatttcattctgtaaagaattcggtattaaacataaaactggaattccttacaaccccatgggacaaggaatagttgaacgtgctcatcgcaccttaaagaattggctttttaagacaaaagagggtcagctatatcccccaaggtcaccaaaggcccaccttgccttcactttatttgtcctaaatttcttgcacactgatatcaagggccagtctgcagcggatcgccactggcatccagttacttctaattcttatgcattggtaaaatggaaggaccccctgactaatgaatggaagggtccagatccagttataatttggggtaggggctcagtttgtgttttttcacgagatgaagatggagcgtggtggctgccagagagattaattcgtcagatgaacacagattctgactcttctggtaagtatcattctaaagactaaaattccttttgtgcttaaaattcagctgagagcaacagctctcaaagctgttctccagctactctctgagccagcttcccggcaggaggccggagactagcctcagttttacaatttgcatttgaataaagtacctagacttccctgaaagaagttctgctttcctactttctcactgtctttcaagattttgtctttgaagcaggtaaatcaacattcccgaggcggaccagtggatgtgcatccccgcccccctagagcacacaggtggcagctgttacccccagtctcaggacatttccagcacgtggttttcagtctgagttaaaaatttaggtttacctagagggctagaagagcagatatttccatattaataaagattggtttttattttgatagacaggcttagccccttagctgacctctggcttttcacccttgctgttactgcaaggtgtccttagctcaataggctgtggaaaaaacagggatgaggaggaacgacttccagctcctattttagccacaaatcgtggtgttactaacgacataattcttgcttaggctttgctaattctgaggttgataattctcctttaggagctgcacagcactcagaactgtgcatactggtttgtgattgtacaaattcagtatgggcaccgcttggtgcagagatacttactgcaagggaaggtccggcttgaccatttctgagtttcctgtgagataaacccggtttgaaagaggttggtaccaaattttggttaaaaataaaaaatattctccggctctacctcgcctccccaaaaggtaccgagagccacatgtgtgggttttacccacgggaggaatcgggtccatgtccacccaagccaaggttaaaagcccactcatctacggatgagaaaatcatttgatcacctcagttaagcgttgccttatttaacttaattaataggggggagagagattggagacgtactattgaaagggcaagcccttcactgcctcccacccaaataaaagagccggtcgaacgccttctccctgtttcccacctatcttccaaaaatgcggaggaattcaacttagtgttattttcacatcgttcagtcaaacttagccagagttccaacgccctacttaaaattcaactagaaagttacctaccaagtactaattagcattataaagtcagagtctgcagctccaggcctttcagttagttgtttactagaaaggacagtcttaagccagatacagtttaccataagaaaagttaaagaatcccagtgaagcaagttttttctttagccctagattccaggcagaactattgagcatagataattttcccccctcaggccagctttttcttttttttaattttgttaataaaagggaggagatgtagtctcccctcccctagcctgaaacctgcttgctcggggtggagcttcctgctcattcgttctgccacacccactgctggaacctgaggagccacacacgtgcacctttctactggaccagagattatttggcgggaatcgggtcccctcccccttccttcataactaatgtcgcaacaataaaatttgggctttgatcagaatgaaattgtcttagctccgttttttcttccgccccgtctagattcctctcttacagctcgagcggccttctcagtcgaaccgttcacgttgcgagctgctggcggccgcaaca

SEQ ID NO: 370 - DNA, 7472 bp, Artificial Sequence
  Description of Artificial Sequence: Synthetic polynucleotide
tgtagtctcccctcccccagcctgaaacctgcttgctcggggtggagcttcctgctcattcgttctgccacgcccactgctggaacctgaggagccacacacgtgcacctttctactggacccgagattattcggggggaatcgggtcccctcccccttccttcataactagtgtcccaacaataaaatttgagctttgatcataatgaatttgtcttagctctgtttcttctttcgccccgtctagattcctctcttacagctcgagtagccttctcagtcgaaccgttcatgttgcgagctgctggcgggtgcaacattttggcgccagaactgggacctgaagaatggcagagagatgctaagaggaacgctgtggtggagctccacaggaaaggatcttcatatcggacatcggagcaacggacaggtacacatgctagcgctagcttaaaatttcagttttgtaaagtgttgctgaggatgcggtaggatacgaattaagcttgaatcagtgctaacccaacgctggttctgcttgggtcagcagcgtgttaatcggaactagaaacggaaacaggcaggttagccgcagctttttaggaagctgcttaggtggaagaagaaagggtttaaagtcatggatcaggcggttgcccatagttttcaggagttgtttcaggccagaggagtaaggcttgaagtacaattagtaaaaaaatttttaggtaagatagatagctgttgcccatggttcaaggaagaagaaacactaaattgtggaacctgggagaaagttggtgaggccttaaaaatcactcaggcagataattttaccctaggcctctgggcgctcgtaaatgatgcaataaaagatgccacttccccagggctaagttgcccccaggcggagcttgtggtatctcaggaggagtgcctgtcagagagggcctcctcagaaaaagatcttcttaactcaaaagttgataaatgtggaaactcagatgaaaaactgatttttaacaaaaatcactcagatagaggagctgcccattaccttagtgagaattggtcctcttgtgaatctcccgctccacctgtagtccccacttcgggaggtgccactcatagggacacacgactaagcgagttagagtttgagattaagcttcagaggctgactaatgagcttcgggaactaaaaaagatgtcagaagcggagaagagtaactcttctgtagttcaccaggtgccgctagaaaaggttgtgagtcaggctcgtgggaaaggacagaatatgtctaatacgctagcctttcctgtggtcgaggtagttgatcagcaagatactaggggcagacattgccagaccttagatttcaagttgataaaagagttaaaggcggctgttgtgcaatatggcccttcagccccattcactcaagcattactggacacagttgtggagtcacacttaacccctttagattggaagactctttctaaggctaccctgtcaggaggagattttttgctttgggattctgaatggcgagacgccagtaagaaaactgctgcttctaacgctcaggctggtaattcaggctgggatagcaacatgctattaggggagggtccatatgaaggacaaacaaatcagattgattttcctgttgcagtgtacgcacaaattgcgacggccgcgcgccgagcttggggaaggttgccagtcaaaggagagattggtggaagtttagctagcattcggcagagttctgatgaaccatatcaggattttgtggacaggctattgatttcagctagtagaatccttgggaatccggacacgggaagtcctttcgttatgcaattggcttatgagaatgctaatgcaatttgccgagctgcgattcaaccgcataagggaacgacagatttggcgggatatgtccgcctttgcgcagacatcgggccttcctgcgagatcttgcagggaacccacgtgcaagcaatgttctcaaggaaacgagggaaaaatgtatgctttaagtgtggaagtttagatcattttagaattgattgtcctcagaacaagggtgccgaggttagacaaacaggccgtgccccaggaatatgtccccggtgtgggaaggaccgccactgggcaaaagattgtaagcataaaacaagggttttgagccgcccggtgccgggaaatgaggaaaggggtcagacccaggccccgagttactcaaagaagacagcttatggggctataaatctgctgcccagacaacaagatcagttcttgagcttgtcaggtcaaacccaggaaatgcaagactggacctctgttccactgtccatgcagcattaaccccagaagtgggagtccaaactctgcctaccggagtctttggaccactacctgtaggaacctgtggttttctcttaggacgaagcagttctattgtagaaggcctgcagatttatccaggtgttataagtaatgattatgagggagaaattaaaatcatagccgcttgccctcgtggtgctctaactatacccgctaatcagaaaattgctcaacttactttgatccctttgcgctggtcactatctaaattctttgaaaatgaagaaggacagaataactttgactcctctggcgtaaattgggtgaaatctatcaccaatcagagacctaaccttaaattgattcttgatggaaaaagctttgaaggattaatagataccggggccgatgtaacgattattagagggcaggactggccctcaaactggcccctgtctgtttccttgactcaccttcaaggaattggttatgccagtaacccaaaacgtagttccaaattgctaacctggagagatgaggatggaaaatcagaaaatattcaaccgtatgttatgccaaatttgcctgtaaccctgtggggaagagatctgttgtcacagatgggcgttatcctgtgcagttctaaggagatggtgactgaacagacgttcaggcagggacccctgcctgatcgtggactaataaagaagggacagaaaattaagacttttgaggatcttaaaccccactctaacgtgagaggtttaaagtattttcagtagcggccactgtcttgcctgcatcccacgccgaaaaaattcaatggcgtaatgatattccggtgtgggtagatcagtggtctttacctaaagagaaaatagaggctgcttctttgctagtgcaggagcagttagaagcaggacatttggtggagtctcactctccctggaatacacccattttcattatcaggaagaaatcgggaaaatggagactgttgcaagatttaagaaaggttaatgaaaccatggtacttatgggaactttacaaccggggctcccctccccagtagccattcctaagggatattataagattgttatagatttgaaagattgtttctttaccatccctttgcatccaaaggattgtgagagatttgcttttagtgttccttctgtaaatttcaaggaacccatgaaaagatatcaatggacagttctcccgcagggcatggctaatagtcccaccttatgtcaaaggtttgtggcaaaggcaattcagcctgttagacaacaatggccaaatatttacatcattcatttcacagatgatgtcttgatggcgggaaaggacccccaagatttgcttttgtgttatggagacttacgaaaggccctggctgataagggattacaaattgcttctgaaaagatacaaactcaggatccttataattatttgggttttagactcactgatcaagctgtttttccccagaaaattgttattcgtagagataacttaaggaccttaaatgattttcaaaaattgttaggtgatataaattggcttcgcccctatctaaagcttactacaggggagttgaaacctttatttgatattcttaaagggagttctgatcccacttcccctagatccctaacctcagaaggactactggccttacagctagtggaaaaggctattgaagaacagttcgtcacttacatagattactccctgctgctgcacctgttaatttttaatacgactcatgtgcctacaggattgctatggcaaaaatttcctataatgtggatacattcgaggatttctcccaaacgtaatatcttgccatatcacgaagcagtggctcagatgattatcactggaagaaggcaggcattgacttattttggaaaggagccagatatcattgtccagccttacagcgtgagtcaggacacttggctgaaacagcatagtacagattggttgcttgcacaattagggtttgaaggaactatagatagccactacccccaagataggttgataaaattcttaaatgtacatgatatgatatttcctaagatgactttcttacagcctttaaataatgctctattgatttttactgatggctcctctaaagggcgagctggatatcttattagtaatcaacaggttattgtagagactcctggtctctcggctcagctcgccgaattaacagcagtactgaaggtttttcagtctgtacatgaggcttttaatatttttactgacagtttatatgttgctcagtcagtacccttattggaaacctgtggtatgtttaacttcaatacgctgtcaggatctttattttcagaattacaaaacatcattctcgcccggaaaaatccgttttatattggccacatacagtctcactctggtcttcctggacctctggcagagggtaatgatcgcattgacagagctctaataggagaagccttagtttcagatcgggttgctttggcccaatgtgatcatgaaaggtttcatctctctagccataccctaaggctccgacataagatcacaaaggagcaagcgagaatgattgtaaaacaatgtcctaaatgtattactttatctccagtgccgcatctaggagttaatcctagaggccttatgcctaatcatatttggcaaatggatataacccattatgcagaatttggaaaactaaaatatatacatgtttgcattgatacttgttcaggatttctttttgcttctctgcatacaggagaagcttcaaaaaacgtaattggtcattgcctacaagcatttaatgccatgggattgcctaaacttattaagacagacaatgggccatcttattccagtaaaaactttatttcattctgtaaagaattcggtattaaacataaaactggaattccttacaaccccatgggacaaggaatagttgaacgtgctcatcgcaccttaaagaattggctttttaaaacaaaagaggggcagctatatcccccaaggtcaccaaaggcccaccttgccttcaccttatttgtcctaaatttcttgcacaccgatatcaagggccagtctgcagcggatcgccactggcatccagttacttctaattcttatgcattggtaaaatggaaggaccccctgactaatgaatggaagggtccagatccagttctaatttggggtaggggctcagtttgtgttttttcacgagatgaagatggagcgtggtggctgccagagagattaattcgtcagatgaacacagattctgactcttctggtaagtatcattcgaaagactaaaattccttttgtgcttagaattcagctgagagctaaagctcccaaagctgttttccagctactctctgagccagctcccgacaggaggccggagactagcctcagctttacaatttgcatttgaataaagtacctagacttccctgaaagaagttctgctttcctactttctcactgtctttcaagattttgtctttcaagcaggtaaatcaacactctcgaagcggaccagcggatgtgcatccccgcccccctagagcacacaggtggctgctgttatcttctttccaaggacatttccagcacgtggctttcagtctgagttaaaaattaggtttacctagagggctagaagagtagatatttctatattaataaagattggtttttattttgatagacaggcttagccccttagctgacctctggcttttcacccttgctgttactgcaaggtgtccttaggctgtggaaaaaacagggatgaggaggaacgacttccagctcctattttagccacaaatcgtggtgttactaacgacataattcttgcttaggctttgctaattctgaggttgataattctcctttaggagctgcacagcactcagaactgtgcatactggtttgtgattgtacaaattcagtatgggcatcgcttggtgcagaggtactgcaagggaaggtccggcttgaccatttctgagtttcctgtgagataaacccggtttaaaagaggttggtatcatattttggttaaaaatcaaaaatatttttcggctctgcctcgcctccccaaaagatacccagagccacatgtgtgggtcttaccagtacccacggggggaatcgggtccatgtccatccaagccaaggttaaaagcccactcatctacggatgagaaaatcatttgatcacctcagttaagcgttgccttatttaacttaattaataggggggagagagattggagacgtactattgaaagggcaagcccttcactgcctcccacccaaataaaaaagccaattggccttgtactacaagagccggtcgaactccttctccctgtttcccacctatcatccaaaaatgcggaggaatatcaacttagtgttattttcacattgttcagtcaaacttagccagagttccaacgccctacttaaaattcaactagaaagttacctaccaagtactaattagcattataaagtcagagtctgcagctccaggcctttcagttagttgtttactagaaaggacagtcttaagccagatacagtttaccataagaaaagttaaagaatcccagtgaagcaagttttttctttagccctagattccaggcagaactattgagcatagataattttcccccctcaggccagctttttcttttttttaaattttgttaataaaagggaggagatgtagtctcccctgccccagcctgaaacctgcttgctcggggtggagcttcctgctcattcgttctgccacgcccactgctggaacctgaggagccacacacgtgcacctttctactggacccgagattattcggcgggaatcgagtcccctcccacttccttcataactagtgtcccaacaataaaatttgagctttgatcagaatgaatttgtcttagctccgtttcttctttcgccccgtctagattcctctcttacagctcgagtagccttctcagtcgaaccattcatgttgcgagctgctggcggctgcaaca

SEQ ID NO: 371 - DNA, 7492 bp, Artificial Sequence
  Description of Artificial Sequence: Synthetic polynucleotide
tgtagtctcccctcccccagcctgaaacctgcttgctcaggggtggagcttcccgctcatcgctctgccacgcccactgctggaacctgcggagccacacacgtgcacctttctactggaccagagattattcggcgggaatcgggtcccctcccccttccttcataactagtgtcccaacaataaaatttgagctttgatcagaatgaatttgtcttggctccgtttcttctttcgccccgtctagattcctctcttacagctcgagtggccttctcagtcgaaccgttcacgttgcgagctgctggcggccgcaacattttggcgccagaactgggacctgaagaatggcagagagatgctaagaggaacgctgctttggagctccacaggaaaggatcttcgtatcggacatcggagcaacggacaggtacacatgctagcgctagcttaaaatttcagttttgtaaagtgttgctgaggatgtggtaggatacgaattaagcttgaatcagtgctaacccaacgctggttctgcttgggtcagcagcgtgttaatcggaactagaaacggaaacaggcaggttagccgcagctttttaggaagctgcttaggtggaagaagaaagggtttaaagtcatggatcaggcggttgcccatagttttcaggagttgtttcaggccagaggagtaaggcttgaagtacaattagtaaaaaattttttaggtaagatagatagctgttgcccatggttcaaggaagaagaaacactagattgtggaacctgggagaaagttggtgaggccttaaaaatcactcaggcagataattttaccctaggcctctgggcactcataaatgatgcaataaaagatgccacttccccagggctaagttgcccccaggcggagcttgtggtatctcaggaggagtgcctgtcagagagggcctcctcagaaaaagatcttcttaactcaaaaattgataaatgtggaaactcggatgaaaaactgatttttaacaaaaatcactcagatagaggagctgcccattaccttaatgagaattggtcctcttgtgaatctcctgctcaacctgtagtccccacttcgggaggtgccactcatagggacacacgactaagcgagttagagtttgagattaagcttcagaggctgactaatgagcttcgggaactaaaaaagatgtcagaagcggagaagagtaactcttctgtagttcaccaggtgccgctagaaaaggttgtgagtcaggctcatgggaaaggacagaatatctctaatacgctagcctttcctgtggttgaggtagttgatcagcaagatactaggggcagacattaccagaccttagatttcaagttgataaaagagttaaaggcggctgttgtgcaatatggcccttcagccccattcactcaagcattactggacacagttgtggagtcacacttaacccctttagattggaagactctttctaaggctaccctgtcaggaggagattttttgctttgggattctgaatggcgagacgccagtaagaaaactgctgcttctaacgctcaggctggtaattcagactgggatagcaacatgcttttaggagagggcccttatgagggacagacaaatcagattgattttcccgttgcagtgtacgcgcaaattgcgacggccgcacgccgtgcttggggaaggttgccagtcaaaggagagattggtggaagtttagctagcattcggcagagttctgatgaaccatatcaggattttgtggacaggctattgatttcagctagtagaatccttggaaatccggacacgggaagtcctttcgttatgcaattggcttatgagaatgctaacgcaatttgccgagctgcgattcaaccgcataagggaacgacagatttggcgggatatgtccgtctttgcgcagacatcgggccttcctgcgagaccttgcagggaacccacgcgcaggcaatgttctctaggaaacgagggaatagtgcatgctttaaatgtggaagtttagatcattttagaattgattgtcctcagaacaagggcgccgaggttagacaaacaggccgtgccccgggaatatgtccccgatgtggaaagggccgccactgggcgaaagattgcaagcataaaacgagggttttgagccgcccggtgccgggaaacgaggaaaggggtcagccccaggccccaagttactcaaagaagacagcttatggggctctaaatctgctgcccagccaacaagatcagttcttgagcttgtcaggtcaaacccaggaaacgcaagactggacctctgttccactgtccatgcagcattaaccccagaagtgggagtccaaactctgcctaccggagtctttggaccactacctgtaggaacctgtggttttctcttaggacgaagcagttctattgtagaaggcctgcagatttatccaggtgttataagtaatgattatgagggagaaattaaaatcatagccgcttgccctcgtggtgctataactatacccgctaatcagaaaattgctcaacttaccttgatccccttgcgctggtcactatctaaattctctaaaaatgaagaaggacagattaactttgactcctctggcgtaaattgggtgaaatctatcactaatcagagacctaaccttaaattgattcttgatggaaaaagctttgaaggattaatagataccggggccgatgtaaccattattagagggcaggactggccctcaaactggcccctgtctgtttccttgactcaccttcaaggaattggttatgccagtaacccaaaacgtagttccaaattgctaacctggagagatgaggatggaaaatcaggaaatattcagccgtatgttatgcaaaatttgcctgtaaccctgtggggaagagatctgttgtcacagatgggcgttatcctgtgcagttctaaggaaatggtgactgaacagacgttcaggcagggacccctgcctgatcgtggactaataaagaagggacagaaaattaagacttttgaagatcttaaaccccactctaacgtgagaggtttaaagtattttcagtagtggccgctgtcttgcctgcatcccacgccgaaaaaattcaatggcgtaatgatattccggtgtgggtagatcagtggtctttacctaaagagaaaatagaggccgcttctctgctagtgcaggagcagttagaagcaggacatttggtggagtctcattctccctggaatacacccattttcattatcaggaagaaatcgggaaaatggagactgttgcaagatttaagaaaggttaatgaaaccatggtacttatgggaactttacaaccggggctcccctccccagtagccattcctaagggatactataagattgttatagatttgaaagattgtttctttaccatccctttgcatccagaggattgtgagagatttgcttttagtgttccttctgtaaatttcaaggaacccatgaaaagatatcaatggacagttctcccgcaggggatggctaatagtcccaccttatgtcaaaagtttgtggcaaaggcaattcagcctgttagacaacaatggccaaatatttacatcattcatttcacagatgatgttttgatggcgggaaaggacccccaagatttgcttttgtgttatggagacttacgaaaggccctggctgataagggattacaaattgcttctgaaaagatacaaactcaggatccttataattatttgggttttagactcactgaccaagctgtttttcaccagaaaattgttattcgtagagataacttaaggaccttaaatgattttcaaaaattgttaggtgatataaactggcttcgcccctatctaaagcttactacaggggagttgaaacctttatttgatattcttaaagggagttctgatcctacttcccctagatccctaacctcagaaggtttactggccttacagctagtggaaaaggctattgaagaacagtttgtcacttacatagattactccctgccgctgcacctgttaatttttaacacgactcatgtgcctacgggattgctatggcaaaaatttcctataatgtggatacattcaaggatttctcccaaacgtaatattttgccatatcatgaagcagtggctcagatgattatcactggaagaaggcaggcattgacttattttggaaaggagccagatatcattgtccagccttacagcgtgagtcaggacacttggctgaaacagcatagtacagattggttgcttgcacaattagggtttgaaggaactatagatagccactacccccaagataggttgataaaattcttaaatgtacatgatatgatatttcctaagatgacttccttacagcctttaaataatgctctattgatttttactgatggctcctctaaagggcgagctggatatcttattagtaatcaacaggttatcgtagagactcctggtctctcggctcagctcgccgaactaacagcagtactgaaggtttttcagtctgtacaggaggcttttaatatttttactgacagtttatatgttgctcagtcagtacccttattggaaacctgtggtacttttaacttcaatacgccgtcaggatctttattttcagaattacaaaacatcattctcgcccggaaaaatccgttttatattggccacatacggtctcactctggtcttcctggacctctggcagagggtaataattgcattgacagagctctaataggagaagccttagtttcagatcgggttgctttggcccaacgtgatcatgaaaggtttcatctctctagccataccctaaggctccgacataagatcaccaaggagcaagcgagaatgattgtaaaacaatgtcctaaatgtattactttatctccagtgccgcatctaggagttaatcctagaggccttatgcctaatcatatttggcaaatggatataacccattatgcagaatttggaaaactaaaatatatacatgtttgcattgatacttgttcaggatttctctttgcttctctgcatacaggagaagcttcaaaaaacgtaattgatcattgcctacaagcatttaatgccatgggattacctaaacttattaagacagacaatgggccatcttattccagtaaaaactttatttcattctgtaaagaattcggtattaaacataaaactggaattccttacaaccccatgggacaaggaatagttgaacgtgctcatcgcaccttaaagaattggctctttaagacaaaagaggggcagctatatcccccaaggtctccaaaggcccaccttgccttcaccttatttgtcctaaatttcttgcacaccgatatcaagggccagtctgcagcggatcgccactggcatccagttacttctaattcttatgcattggtaaaatggaaggaccccctgactaatgaatggaagggtccagatccagttctaatttggggtagaggctcagtttgtgttttttcacgagatgaagatggagcacggtggctgccagagagattaattcgtcagacgaacacagattctgactcttctggtaagtatcattctaaagactaaaattccttttgtgcttaaaattcagctgagagcaacagctctcaaagctgttctccagctactctctgagccagctcccgacaggaggccggagactagcctcagctttacaatttgcatttaaataaagtacctagacttccccgaaaaaagttctgcttttctactttctcactgtctttcaagattttgtctttcaagcaggtaaatcaacattctcgaggcggaccagcggatgtgcatccccgcccccctagagcactcaggtggcagctgttatccccagtctcaggacattccagcatgtggccttcagtctgagttaaaaattaggtttacccagaggactagaatagtagatatttctatattaataaagattggtttttattttgatagacaggcttagccccttagctgacctctggcttttcacccttgctgttactgcaaggtgtctttagctcaataaggctgtggaaaaaaacagggatgaggaggaacggctcccagctcctattttagccacaaatcgtggtgttactaacgacataattcttgcttaggctttgctaaatctgaggttgataattctcctttaggagctgcacagcgctcagaactgtgcatactgatttgtgatggtacaaattcagtatgggcatcgcttggtgcagatggaggtactgcaaggaaaggtcccagcttgaccatttctgagtttcctgtgagataaacccggtttgaaagaggttggtaccaaattatatatccctcggctctacctcgcctccccaaaaggtaccagagccacaggtgtggattttaacagaatccacgggaggaatcgggtccatgtccacccaagccaaggttaaaagcccactcatctacggatgagaaaatcatttgatcacctcagttaagcgctgccttattttaacttaattaataggggggagagagattggagacttactattgaaagggcaagcccttcactgcctcccacccaaataaaaaagccaattggccttgtactacagagctggccggaccccttatccctgttacccaccaatcatccaaaaatgcggaggaatatcaacttagtgttattcttattatagtgtatttcacacttgttcagtcaaacttagccagagttccaacgccctacttaaaattcaactagaaagttacctaccaagtactaattagcattataaagtcagagcctacagctccaggcttttcagttagttgtttactaagataagaaaagacagtcttagccagatacagtttaccataataaaagttaaagaatcccagggaagcaagttttttcttttagccctagattccaggcagaactattgagcatagataatttttccccctcaggccagctttttctttttttttaattttgttaataaaagggaggagatgtagtctcccctcccccagcctgaaacctgcttgctcaggggtggagcttcccgctcatcgctctgccacgcccactgctggaacctgcggagccacacacgtgcacctttctactggaccagagattattcggcgggaatcgggtcccctcccccttccttcataactagtgtcccaacaataaaatttgagctttgatcagaatgaatttgtcttggctccgtttcttctttcgccccgtctagattcctctcttacagctcgagtggccttctcagtcgaaccgttcacgttgcgagctgctggcggccgcaaca

SEQ ID NO: 372 - DNA, 7450 bp, Artificial Sequence
  Description of Artificial Sequence: Synthetic polynucleotide
tgtagtctcccctcccccagcctgaaacctgcttgctcggggtggagcttcctgctcattcgttctgccacgcccactgctggaacctgaggagccacacacgtgcacctttctactggacccgagattattcggcgggaatcgggtcccctcccccttccttcataactagtgtcccaacaataaaatttgagctttgatcagaatgaatttgtcttagctccgtttcttctttcgccccgtctagattcctctcttacagctcgagtggccttctcagtcgaaccgttcacgttgcgagctgctggcggccgcaacattttggcgccagaactgggacctgaagaatggcagagagatgctaagaggaacgctgcattggagctccacaggaaaggatcttcgtatcggacatcggagcaacggacaggtacacatgctagcgctagcttaaaatttcagttttgtaaagtgatgctgaggatgcggtaggatacgaattaagcttgaatcagtgctaacccaacgctggttctgcttgggtcagcagcgtgttaatcggaactagaaacagaaacaggcaggttagccgcagctttttaggaagctgcttaggtggaagaagaaagggtttaaagtcatggatcaggcggttgcccatagttttcaggagttgtttcaggccagaggagtaaggcttgaagtacaattagtaaaaaaatttttaggtaagatagatagctgttgcccatggttcaaggaagaagaaacactagattgtggaacctgggagaaagttggtgaggccttaaaaatcactcaggcagataattttaccctaggcctctgggcgctcgtaaatgatgcaataaaagatgccacttccccagggctaagttgcccccaggcggagcttgtggtatctcaggaggagtgcctgtcagagagggcctcctcagaaaaagatcttcttaactcaaaaattgataaatgtggaaactcggatgaaaaactgatttttaacaaaaatcactcagatagaggagctgcccattaccttaatgagaattggtcctcttgtgaatctcccgctccacctgtagtccccacttcgggaggtgccactcatagggacacacgactaagcgagttagagtttgagattaagcttcagaggctgactaatgagcttcgggaactaaaaaagatgtcagaagcggagaagagtaactcttctgtagttcaccaggtgccgctagaaaaggttgtgagtcaggctcgtgggaaaggacagaatatgtctaatacgctagcctttccggtggtcgaggtagttgatcagcaagatactaggggcagacattaccagaccttagatttcaagttgataaaagagttaaaggcggctgttgtgcaatatggcccttcagccccattcactcaagcattactggacacagttgtggagtcacacttaacccctttagattggaagactctttctaaggctaccctgtcaggaggagattttttgctttgggattctgaatggcgagacgccagtaagaaaactgctgcttctaacgctcagggtggtaattcagactgggatagcaacatgcttttaggagagggcccttatgagggacagataaatcagattgattttcccgttgcagtgtacgcgcaaattgcgacggccgcacgccttgcttggggaagattgccagtcaaaggagagattggtggaagtttagctagcattcggcagagttctgatgaaccatatcaggattttgtggacaggctattgatttcagctagtagaatccttgggaatccggacacgggaagtcctttcgttatgcaattggcttatgagaatgctaatgcaatttgccgagctgcgattcaaccgcataagggaacgacagatttggcgggatatgtccgcctttgcgcagacatcgggccttcctgcgagaccttgccgggaacccacgcgcaggcaatgttctcaaggaaacgagggaaaaatgtatgctttaagtgtggaagtttagatcattttagaattgattgtcctcagaacaagggtgccgaggttagacaaacaggccgtgccccaggaatatgtccccggtgtgggaagggccgccactgggcaaaagattgtaagcataaaacgagggttttgagccgcccagtgccgggaaacgaggaaaggggtcagccccaggccccgagttactcaaagaagacagcttatggggctataaatctgctgcccagccaacaagatcagttcttgagcttgtcaggtcaaacccaggaaatgcaagactggacctctgttccactgtccatgcagcattaaccccagaagtgggagtccaaactctgcctaccggagtctttggaccactacctgtaggaacctgtggttttctcttaggacgaagcagttttattgtagaaggcctgcagctttatccaggtgttataagtaatgattatgagggagaaattaaaatcatagccgcttgccctcgtggtgctataactatacccgctaatcagaaaattgctcaacttactttgatccctttgcgctggtcactatctaaattctttgaaaatgaagaaggacagaataactttgactcctctggcgtaaattgggtgaaatctatcaccaatcagagacctaaccttaaattgattcttgatggaaaaagctttgaaggattaatagataccggggccgatgtaacgattattagagggcaggactggccctcaaactggcccctgtctgtttccttgactcaccttcaaggaattggttatgccagtaacccaaaacgtagttccaaattgctaacctggagagatgaggatggaaaatcaggaaatattcagccgtatgttatgccaaatttgcctgtgaccctgtggggaagagatctgttgtcacagatgggcgttatcctgtgcagttctaaggagatggtgactgaacagacgttcaggcagggacccctgcctgatcgtggactaataaagaagggacagaaaattaagacttttgaggatcttaaaccccactctaacgtgagaggtttaaagtattttcagtagcggccactgtcttgcctgcatcccacgccgaaaaaattcaatggcgtaatgatattccggtgtgggtagatcagtggtctttacctaaagagaaaatagaggccgcttctttgctagtgcaggagcagttagaagcaggacatttggtggagtctcactctccctggaatacacccattttcattatcaggaagaaatcgggaaaatggagactgttgcaagatttaagaaaggttaatgaaaccatggtacttatgggaactttacaaccggggctcccctccccagtagccattcctaagggatattataagattgttatagatttgaaagattgtttctttaccatccctttgcatccaaaggattgtgagagatttgcttttagtgttccttctgtaaatttcaaggaacccatgaaaagatatcaatggacagttctcccgcagggcatggctaatagtcccaccttatgtcaaaggtttgtggcaaaggcaattcagcctgttagacaacaatggccaaatatttacatcattcatttcacagatgatgtcttgatggcgggaaaggacccccaagatttgcttttgtgttatggagacttacgaaaggccctggctgataagggattacaaattgcttctgaaaagatacaaactcaggatccttataattatttgggttttagactcactgatcaagctgtttttccccagaaaattgttatttgtagagataacttaaggaccttaaatgattttcaaaaattgttaggtgatataaattggcttcgcccctatgtaaagcttactacaggggagttgaaacctttatttgatattcttaaagggagttctgatcccacttcccctagatccctaacctcagaaggattactggccttacagctagtggaaaaggctattgaagaacagtttgtcacttacatagattactccctgccgctgcacctgttaatttttaatacgactcatgtgcctacgggattgctatggcaaaaatttcctataatgtggatacattcgaggatttctcccaaacgtaatatcttgccatatcatgaagcagtggctcagatgattatcactggaagaaagcaggcattgacttattttggaaaggagccagatatcattgtccagccttacagcgtgagtcaggacacttggctgaaacagcatagtacagattggttgcttgcacaattagggtttgaaggaactgtagatagccactacccccaagataggttgataaaattcttaaatgtacatgatatgatatttcctaagatgacttccttacagcctttaaataatgctctattgatttttactgatggctcctctaaagggcgagctggatatcttattagtaatcaacaggttatcgtagagactcctggtctctcggctcagctcgccgaattaacagcagtactgaaggtttttcagtctgtacatgaggcttttaatatttttactgacagtttatatgtcgctcagtcagtacccttattggaaacctgtggtacgtttaacttcaatacgccgtcaggatctttattttcagaattacaaaacatcattctcgcccggaaaaatccgttttatattggccacatacggtctcactctggtcttcctggacctctggcagagggtaatgatcgcattgacagagctctaataggagaagccttagtttcagatcgggttgctttggcccaacgtgatcacaaaaggtttcatctttctagccataccctaaggctccgacataagatcacaaaggagcaagcgagaatgatcgtaaaacaatgtcctaaaagtattactttatctccagtgctgcatctaggagttaatcctagaggccttatgcctaatcatatttggcaaatggatataacccattatgcagaatttggaaaactaaaatatatacatgtttgcattgatacttgttcaggatttctttttgcttctctgcatacaggagaagcttcaaaaaacgtaattgatcattgcctacaagcatttaatgccatgggattgcctaaacttattaagacagacaatgggccatcttattccagtaaaaactttatttcattctgtaaagaattcggtattaaacataaaactggaattccttacaaccccatgggacaaggaatagttgaacgtgctcatcgcaccttaaagaattggctttttaagacaaaagaggggcagctatatcccccaaggtcaccaaaggcccaccttgccttcactttatttgtcctaaatttcttgcacaccgatatcaagggccagtctgcagcggatcgccactggcatccagttacttcaaattcttatgcattggtaaaatggaaggaccccctgactaatgaatggaagggtccagatccagttctaatttggggtaggggctcagtttgtgttttttcacgagatgaagatggagcgcgatggctgccagagagattaattcgtcagatgaacacagattctgactcttctggtaagtatcattctaaagactaaaattccttttgtgcttaaaattcagctgagagcaacagctctcaaagctgttctccagctactctctgagccagctcccgacaggaggccggagactagcctcagctttacaatttgcatttgaataaagtacctagacttccccgaaagaagttctgctttcctactttctcgctgtctttcaagattttgtctttcaagcaggtaaatcaacattctcgaggcagaccagcggatgtgcatccccgcccccctagagcacacaggtggcagctgttatccccagtctcaggacatttccagcacgtggttttcagtctgagttaaaaatttaggtttacctagagggctagaagagtagatatttctatattaataaagattggtttttattttgatagacaggcttagccccttagctgacctctggcttttcacccttgctgttactgcaaggtgtccttagctcaataggctgtggaaaaaacagggatgaggaggaacgacttccagctcctattttagccacaaatcgtggtgttactaacgacataattcttgcttaggctttgctaattctgaggttgataattctcctttaggagctgcacagcactcagaactgtgcatactggtttgtgattgtacaaattcagtatgggcaccgcttggtgcagaggtactgcaagggaaggtccggcttgaccatttctgagtttcctgtgagataaacccggtttaaaagaggttggtatcatattttggttaaaaataaaaaatattttccggctctacctcacctccccaaaaggtaccgagagccacatgtgtgggttttacccacgggaggaatcgggtccatgtccacccaagccaaggttaaaagcccactcatctacggatgagaaaatcatttgatcacctcagttaagcattgccttatttaacttaattaataggggggagagagattggagacgtactattgaaagggcaagcccttcactgcctcccacccaaataaaagagccggtcgaactccttctccctgtttcccacctatcatccaaaaatgcggaggaatatcaacttagtgttattttcacattgttcagtcaaacttagccagagttccaacgccctacttaaaattcaactagaaagttacctaccaagtactaattagcattataaagtcagagtctgcagctccaggcctttcagttagttgtttactagaaaggacagtcttaagccagatacagtttacaataagaaaagttaaagaatcccagtgaagcaagttttttctttagtcctagattccaggcagaactattgagcatagataattttcccccctcaggccagctttttctttttttaaattttgttaataaaagggaggagatgtagtctcccctcccccagcctgaaacctgcttgctcggggtggagcttcctgctcattcgttctgccacgcccactgctggaacctgaggagccacacacgtgcacctttctactggacccgagattattcggcgggaatcgggtcccctcccccttccttcataactagtgtcccaacaataaaatttgagctttgatcagaatgaatttgtcttagctccgtttcttctttcgccccgtctagatttctctcttacagctcgagtggccttctcagtcgaaccgttcacgttgcgagctgctggcggccgcaaca

SEQ ID NO: 373 - DNA, 7456 bp, Artificial Sequence
  Description of Artificial Sequence: Synthetic polynucleotide
tgtagtctcccctcccctagcctgaaacctgcttgctcggggtggagcttcctgctcattcgttctgccacgcccactgctggaacctgaggagccacacacgtgcacctttctactggaccagagattattcggcgggaatcgggtcccctcccccttccttcataactagtgtcgcaacaataaaattggagctttgatcagaatgaaattgtcttagctccgttttttcttccgccctgtctagattcctctcttacagctcgagcggccttctcagtcgaaccgttcacgttgcgagctgctggcagccgcaacattttggcgccagaactgggacctgaagaatggcagagagatgctaagaggaacgctgcattggagctccacaggaaaggatcttcgtatcggacatcggagcaacggacaggtacacatgctagcgctagcttaaaatttcagttttgtaaagtgttgctgaggatgcggtaggatacgaattaagcttgaatcagtgctaacccaacgctggttctgcttgggtcagcagcgtgttaatcggaactagaaacggaaacaggcaggttagccgcagctttttaggaagctgcttaggtggaagaagaaagggtttaaagtcatggatcaggcggttgctcatagttttcaggagttgtttcaggccagaggagtaaggcttgaagtacaattagtaaaaaattttttaggtaagatagatagctgttgcccatggttcaaggaagaagaaacactagattgtggaacctgggagaaagttggtgaggccttaaaaatcactcaggcagataattttaccctaggcctctgggcgctcgtaaatgatgcaataaaagatgccacttccccagggctaagttgcccccaggcggagcttgtggtatctcaggaggagtgcctgtcagagagggcctcctcagaaaaagatcttcttaactcaaaaattgataaatgtggaaactcggatgaaaaactgatttttaacaaaaatcactcagatagaggagctgcccattaccttaatgagaattggtcctcttgtgaatctcccgctccacctgtagtccccacttcgggaggtgccactcatagggacacacgactaagcgagttagagtttgagattaagcttcagaggctgactaatgagcttcgggaactaaaaaagatgtcagaagcagagaagagtaactcttctgtagttcaccaggtgccgctagaaaaggttgtgagtcaggctcgtgggaaaggacagaatatgtctaatacgctagcctttccggtggtcgaggtagttgatcagcaagatactaggggcagacattaccagaccttagatttcaagttgataaaagagttaaaggcggctgttgtgcaatatggcccttcagccccattcactcaagcattactggacacagttgtggagtcacacttaacccctttagattggaaggctctttctaaggctaccctgtcaggaggagattttttgctttgggattctgaatggcgagacgccagtaagaaaactgctgcttctaacgctcaggctggtaattcagactgggatagcaacatgcttttaggagagggcccttatgagggacagacaaatcagattgattttcccgttgcagtgtacgcgcaaattgcgacggccgcacgccgtgcttggggaaggttgccagtcaaaggagagattggtggaagtttagctagcattcggcagagttctgatgaaccatatcaggattttgtggacaggctattgatttcagctagtagaatccttgggaatccggacatgggaagtcctttcgttatgcaattggcttatgagaatgctaatgcaatttgccgagctgcgattcaaccgcataagggaacgacagatttggcgggatatgtccgcctttgcgcagacatcgggccttcctgcgagaccttgcagggaacccacgcgcaggcaatgttctcaaggaaacgagggaaaaatgtatgctttaagtgtggaagtttagatcattttagaattgattgtcctcagaacaagggtgccgaggttagacaaacaggccgtggcccaggaatatgtccccgatgtggaaagggccgccactgggcaaaagattgtaagcataaaacgagggttttgagccgcccggtgccgggaaacgaggaaaggggtcagccccaggccccgagttactcaaagaagacagcttatggggctataaatctgctgcccagccaacaagatcagttcttgagcttgtcaggtcaaacccaggaaatgcaagactggacctctgttccactgtccatgcagcattaaccccagaagtgggagtccaaactctgcctaccggagtttttggaccactacctgtaggaacctgtggttttctcttaggacgaagcagttctattgtagaaggcctgcagatttatccaggtgttataagtaatgattatgagggagaaattaaaatcatagccgcttgccctcgtggtgctataactatacccgctaatcagaaaattgctcaacttactttgatccctttgcgctggtcactatctaaattctttgaaaatgaagaaagacagaataactttgactcctctggcgtaaattgggtgaaatctatcaccaatcagagacctaaccttaaattgattcttgatggaaaaagctttgaaggattaatagataccggggccgatgtaacgattattagagggcaggactggccctcaaactggcccctgtctgtttccttgactcaccttcaaggaattggttatgccagtaacccaaaacgtagttccaaattgctaacctggagagatgaggatggaaaatcaggaaatattcagccgtatgttatgccaaatttgcctgtaaccctgtggggaagagatctgttgtcacagatgggcgttatcctgtgcagttctaaggagatggtgactaaacagacgttcaggcagggacccctgcctgatcgtggactaataaagaatggacagaaaattaagacttttgaggatcttaaaccccactctaacgtgagaggtttaaagtattttcagtagcggccactgtcttgcctgcatcccacgccgaaaaaattcaatggcgtaatgatattccggtgtgggtagatcagtggtctttacctaaagagaaaatagaggccgcttctttgctagtgcaggagcagttagaagcaggacatttggtggagtctcactctccctggaatacacccattttcattatcaggaagaaatcgggaaaatggagactgttgcaagatttaagaaaggttaatgaaaccatggtacttatgggaactttacaaccggggctcccctccccagtagccattcctaagggatattataagattgttatagatttgaaagattgtttctttaccatccctttgcatccaaaggattgtgagagatttgcttttagtgttccttctgtaaatttcaaggaacccatgaaaagatatcattggacagttctcccgcagggcatggctaatagtcccaccttatgtcaaaggtttgtggcaaaggcaattcagcctgttagacaacaatggccaaatatttacatcatccatttcacagatgatgtcttgatggcgggaaaggacccccaagatttgcttttgtgttatggagacttacgaaaggccctggctgataagggattacaaattgcttctgaaaagatacaaactcaggatccttataattatttgggttttagactcactgatcaagctgtttttccccagaaaattgttattcgtagagataacttaaggaccttaaatgattttcaaaaattgttaggtgatataaattggcttcgcccctatctaaagcttactacaggggagttgaaacctttatttgatattcgtaaagggagttctgatcccacttcccctagatccctaacctcagaaggattactggccttacagctagtggaaaaggctattgaagaacagtttgtcacttacatagattactccctgccgctgcacctgttaatttttaatacgactcatgtgcctacgggattgctatggcaaaaatttcctataatgtggatacattcgaggatttctcccaaacgtaatatcttgccatatcacgaagcagtggctcagatgattatcactggaagaaggcaggcattgacttattttggaaaggagccagatatcattgtccagccttacagcgtgagtcaggacacttggctgaaacagcatagtacagattggttgcttgcacaattagggtttgaaggaactctagatagccactacccccaagataggttgataaaattcttaaatgtgcatgatatgatatttcctaagatgacttccttacagcctttaaataatgctctattgatttttactgatggctcctctaaagggcgagctggatatcttattagtaatcaacaggttatcgtagagactcctggtctctcggctcagctcgctgaattaacagcagtactgaaggtttttcagtctgtgcatgaggcttttaatatttttactgacagtttatatgttgctcagtcagtacccttattggaaacctgtggtacgtttaacttcaatacgccgtcaggatctttattttcagaattacaaaacatcattctcgcccggaaaaatccgttttatattggccacatacggtctcactctggtcttcctggacctctggcagagggtaatgatcgcattgacagagctctaataggagaagccttagtttcagatcgggttgctttggcccaacgtgatcacgaaaggtttcatctttctagccataccctaaggctccgacataagatcacaaaggagcaagcgagaatgatcgtaaaacaatgtcctaaatgtattactttatctccagtgccgcatctaggagttaatcctagaggccttatgcctaatcatatttggcaaatggatataacccattatgcagaatttggaaaactaaaatatatacatgtttgcattgatacttgttcaggatttctttttgcttctctgcatacaggagaagcttcaaaaaacgtaattgatcattgcctacaagcatttaatgccatgggattgcctaaacttattaagacagacaatgggccatcttattccagtaaaaactttatttcattctgtaaagaattcggtattaaacataaaactggaattccttacaaccccatgggacaaggaatagttgaacgtgctcatcgcaccttaaagaattggctttttaagacaaaagagggtcagctatatcccccaaggtcaccaaaggcccaccttgccttcactttatttgtcctaaatttcttgcacaccgatatcaagggccagtctgcagcggatcgccactggcatccagttacttctaattcttatgcattggtaaaatggaaggaccccctgactaatgaatggaagggtccagatccagttctaatttggggtaggggctcagtttgtgttttttcacgagatgaagatggaacgcggtggctgccagagagattaattcgtcagatgaacacagattctgactcttctggtaagtatcattctaaagactaaaattccttttgtgcttaaaattcagctgagagcaacagctctcaaagctgttctccagctactctctgagccagctcccgacaggaggccggagactagccgcagctttacaatttgcatttgaataaagtacctagacttccccgaaagaagttctgctttcctactttctcactgtctttcaagattttgtctttcaagcaggtaaatcaacattctcgaggtggaccagtggatgtgcatccccgcccccctagagcacacaggtggcagctgttacccccagtctcaggacatttccagcacgtggttttcagtctgagttaaaaatttaggtttacctagagggctagaagagtagatatttctgtatttataaagattggtttttattttgatagacaggcttagccccttagctgacctctggcttttcacccttgctgttactgcaaggtgtccttagctcaataggctgtggaaaaaacagggatgaggaggaacgacttccagctcctattttagccacaaatcgtggtgttactaacgacataattcttgcttaggctttgctaattctgaggttgataattctcctttaggagctgcacagcactcagaactgtgcatactggtttgtgattgtacaaattcagtatgggcaccgcttggtgcagagatacttactgcaagggaaggtccggcttgaccatttctgagtttcctgtgagataaacccggtttgaaagaggttggtaccaaattttggttaaaaataaaaaatattttccggctctacctcgcctccccaaaaggtagcgagagccacatgtgtgggttttacccacaggaggaatcgggtccatgtccacccaagccaaggttaaaagcccactcatctacggatgagaaaatcatttgatcacctcagttaagcgttgccttatttaacttaattaatagggggggagagagattggagacgtactattgaaagggcaagccctttactgcctcccacccaaataaaagagccggtcgaacgccttctccctgtttcccacctatcttccaaaaatgcggaggaatatcaacttagtgttattttcacatcgttcagtcaaacttagccagagttccaacgccctacttaaaattcaactagaaagttacctaccaagtactaattagcattataaagtcagagtctgcagctccaggcctttcagttagttgtttactagaaaggacagtcttaaaccagatacagtttaccataagaaaagttaaagaatcccagtgaagcaagttttttctttagccctagattccaggcagaactattgagcatagataattttcccccctcaggccagctttttctttttttttaattttgttaataaaagggaggagatgtagtctcccctcccctagcctgaaacctgcttgctcggggtggagcttcctgctcattcgttctgccacgcccactgctggaacctgaggagccacacacgtgcacctttctactggaccagagattattcggcgggaatcgggtcccctcccccttccttcataactagtgtcgcaacaataaaattggagctttgatcagaatgacattgtcttagctccgttttttcttccgccccgtctagattcctctcttacagctccagcggccttctcagtcgaaccgttcacgttgcgagctgctggcggccgcaaca

SEQ ID NO: 374 - DNA, 7403 bp, Artificial Sequence
  Description of Artificial Sequence: Synthetic polynucleotide
tgtagtctcccctcccccagcctgaaacctgcttgctcggggtggagcttcctgctcattcgttctgccacgcccactgctggaacctgaggagccacacacgtgcacctttctactggacccgagattattcggcgggaatcgggtcccctcccccttccttcataactagtgtcgcaacaataaaatttgagctttgatcagtatgaatttgtcttagctccgtttcttcttttgccccgtctagattcctctcttacagctcgagcggccttctcagtcgaaccgttcacattgcgagctgctggcggccgcaacattttggcgccagaactgggacctgaagaatggcagagagatgctaagaggaacgctgcattggagctccacaggaaaggatcttcgtatcggacatcggagcaacggacaggtacacatgctagcgctagcttaaaatttcagttttgtaaagtgttgctgaggatgcggtaggatacgaattaagcttgaatcagtgctaacccaacgctggttctgcttgggtcagcagcgtgttaatcggaactagaaacggaaacaggcaggttagccgcagctttttaggaagctgcttaggtggaagaagaaagggtttaaagtcatggatcaggcggttgcccatagttttcaggagttgtttcaggccagaggagtaaggcttgaagtacaattagtaaaaaaatttttaagtaagatagatagctgttgcccatggttcaaggaagaagaaacactagattgtggaacctgggagaaagttggtgaggccttaaaaatcactcaggcagataattttaccctaggcctctgggcgctcgtaaatgatgcaataaaagatgccacttccccagggctaagttgcccccaggcggagcttgtggtatctcaggaggagtgcctgtcagagagggcctcctcagaaaaagatcttcttaactcaaaaattgataaatgtggaaactcggatgaaaaactgatttttaacaaaaatcactcagatagaggagctgcccattaccttaatgagaattggtcctcttgtgaatctcccgctccacctgtagtccccacttcgggaggtgccactcatagggacacacgactaagcgagttagagtttgagattaagcttcagaggctgactaatgagcttcgggaactaaaaaagatgtcagaagcggagaagagtaactcttctgtagttcaccaggtgccgctagaaaaggttgtgagtcaggctcgtgggaaaggacagaatatgtctaatacgctagcctttcctgtggtcgaggtagttgatcagcaagatactaggggcagacattaccagaccttagatttcaagttgataaaagagttaaaggcggctgttgtgcaatatggcccttcagccccattcactcaagcattactggacacagttgtggagtcacacttaacccctttagattggaggactctttctaaggctaccctgtcaggaggagattttttgctttgggattctgaatggcgagacgccagtaagaaaactgctgcttctaacgctcaggctggtaattcagactgggatagcaacatgcttttaggagagggcccttatgagggacagacaaaccagattgattttcccgttgcagtgtacgcgcaaattgcgacggccgcacgccgtgcttggggaaggttgcctgtcaaaggagagattggtggaagtttagctagcattcggcagagttctgatgaaccatatcaggattttgtggacaggctattgatttcagctagtagaatccttggaaatccggacacgggaagtcctttcgttatgcaattggcttatgagaatgctaatgcaatttgccgagctgcgattcaaccgcataagggaacgacagatttggcgggatatgtccgcctttgcacagacatcgggccttcctgcgagaccttgcagggaacccacgcgcaggcaatgttctcaaggaaacgagggaaaaatgtatgctttaagtgtggaagtttagatcattttagaattgattgtcctcagaacaagggtgccgaggttagacaaacaggccgtgccccaggaatatgtccccggtgtgggaagggccgccactgggcaaaagattgtaagcataaaacgagggttttgagccgcccggtgccgggaaacgaggaaaggggtcagccccaggccccaagttactcaaagaagacagcttatggggctataaatctgctgcccagccaacaagatcagttcttgagcttgtcaggtcaaacccaggaaatgcaagactggacctctgttccactgtccatgcagcattaatcccagaagtgggagtccaaactctgcctaccggagtctttggaccactacctgtaggaacctgtggttttctcttaggacgaagcagttctattgtagaaggcctgcagatttatccaggtgttataagtaatgattatgagggagaaattaaaatcatagccgcttgccctcgtggtgctataactatacccgctaatcagaaaattgctcaacttactttgatccctttgcgctggtcactatctaaattctttgaaaatgaagaaggacagaataactttgactcccttggcgtaaattgggtgaaatctatcactaatcagagacctaaccttaaattgattcttgatggaaaaagctttgaaggattaatagataccggggccaatgtaacgataattagagggcaggactggccctcaaactggcccctgtctgtttccttgactcaccttcaaggaattggttatgccagtaacccaaaacgtagttccaaattgctaacctggagagatgaggatggaaaatcaggaaatattcagccgtatgttatgccaaatttgcctgtaaccctgtggggaagagatctgttgtcacagatgggcgttatcctgtgcagttctaaggagatggtgactgaacagacgttcaggcagggacccctgcctgatcgtggactaataaagaagggacagaaaattaagacttttgaggatcttaaaccccactctaacgtgagaggtttaaagtattttcagtagcggccactgtcttgcctgcatcccacgccgaaaaaattcaatggcgtaatgatattccggtatgggtagatcagtggtctttacctaaagagaaaatagaggccgcttctttgctagtgcaggagcagttagaagcaggacatttggtggagtctcactctccctggaatacacccattttcattatcaggaagaaatcgggaaaatggagactgttgcaagatttaagaaaggttaatgaaaccatggtacttatgggaactttacaaccggggcttccctccccagtagccattcctaagggatattataagattgttatagatttgaaagattgtttctttaccatccctttgcatccaaaggattgtgagagatttgcttttagtgttccttctgtaaatttcaaggaacccatgaaaagatatcaatggacagttctcccgcagggcatggctaatagtcccaccttatgtcaaaggtttgtggcaaaggcaattcagcctgttagacaacaatggccaaatatttacatcattcatttcacagatgatgtcttgatggcgggaaaggacccccaagatttgcttttgtgttatggagacttacaaaaggccctggctgataagggattacaaattgcttctgaaaagatacaaactcaggatccttataattatttgggttttagactcactgatcaagctgtttttccccagaaaattgttattcgtagagataacttaaggaccttaaatgattttcaaaaattgttaggtgatataaattggcttcgcccctatctaaagcttactacaggggagttgaaacctttatttgatattcttaaagggagttctgatcccacttcccctagatccctaacctcagaaggattactggccttacagctagtggaaaaggctattgaagaacagtttgtcaattacatagattactccctgccgctgcacctgttaatttttaatacgactcatgtgcctacgggattgctatggcaaaaatttcctataatgtggatacattcgcggatttctcccaaacgtaatatcttgccatatcacgaagcagtggctcagatgattatcactggaagaaggcaggcattgacttattttggaaaggagccagatatcattgtccagccttacagcgtgagtcaggacacttggctgaaacagcatagtacagattggttgcttccacaattagggtttgaaggaactctagatagccactacccccaagataggttgataaaattcttaaatgtgcatgatatgatatttcctaagatgacttccttacagcctttaaataatgctctattgatttttactgatggctcctctaaagggcgagctggatatcttattagtaatcaacaggttatcatagagactcctggtctctcggctcagctcgccgaattaacagcagtactgaaggtttttcagtctgtacatgaggcttttaatatttttactgacagtttatatgttgctcagtcagtacccttattggaaacctgtggtacgtttaacttcaatacgccgtcaggatctttattttcagaattacaaaacatcattctcgcccggaaaaatccgttttatattggccacatacggtctcactctggtcttcctggacctctggcagagggtaatgatcgcattgacagagctctaataggagaagccttagtttcagatcgggttgctttggcccaacgtgatcacgaaaggtttcatctttctagccataccctaaggctccgacataagatcacaaaggggcaagcgagaatgatcgtaaaacaatgtcctaaatgtattactttatctccagtgccgcatctaggagttaatcctagaggccttatgcctaatcatatttggcaaatggatataacccattatgcagaatttggaaaactaaaatatatacatgtttgcattgatacttgttcaggatttctttttgcttctctgcatacaggagaagcttcaaaaaacgtaattgatcattgcctacaagcatttaatgccatgggattgcctaaacttattaagacagacaatgggccatcttattccagtaaaaactttatttcattctgtaaagaattcggtattaaacataaaactggaattccttacaaccccatgggacaaggaatagttgaacgtgctcatcacaccttaaagaattggctttttaagacaaaagaggggcagctatatcccccaaggtcaccaaaggcccaccttgccttcaccttatttgtcctaaatttcttgcacaccgatatcaagggccagtctgcagtggatcgccactggcatccagttacttctaattcttatgcattggtaaaatggaaggaccccctgactaatgaatggaagggtccagatccagttctaatttggggtaggggctcagtttgtgttttttcacgagatgaagatggagcgcggtggctgccagagagattaattcgtcagatgaacacagattctgactcttctggtaagtatcattctaaagactaaaattccttttgtgcttaaaattcagctgagagcaacagctctcaaagctgttctccagctactctctgagccagctcccgaaaggaggccggagactagcctcagctttacaatttgcatttgaataaagtacctagacttccctgaaagaagttctgctttcctactttctcactgtctttcaagattttgtctttcaagcaggtaaatcaacactctcgaagcggaccagcggatgtgcatccccgcccccctagagcacacaggtggcagctgttatccccagactcaggacatttccagcatgtggctttcagtctgagttaaaaatttaggtttacctagagggctagaagagtagatttttctatattaataaagattggtttttattttgatagacaggcttagccccttagctgacctctggcttttcacccttgctgttactgcaaggtgtccttagctcaataggctgtggaaaaaacagggatgaggagaaacgacttccagctcctattttacccataaatcgtggtgttattaacgacataattcttgcttaggctttgctaattctgaggttgataattctcctttaggagctgcacagcactcagaactgtgcatactggtttgtgattgtacaaattcagtatgggcaccgcttggtgcagaagtactgcaagggaaggtccggcttgaccgtttctgagtttcctgtgagataaacccggtttaaaagaggttggtatcatattttggttaaaaataaaaaatattttccggctctacctcgcctccccaaaaggtaccgagagccacatgtgtgggttttacccacgggaggaatcgggtccatgtccacccaagccaaggttaaaagcccactcatctacggatgagaaaatcatttgatcacctcagttaagcgttgccttatttaacttaattaataggggggagagagattggagacgtactattgaaaggtcaagcccttcactgcctcccacccaaataaaaaagccaattggccttgtactacaagagccggtcactccttctccctgtttcccacctatcatccaaaaatgcggagatcaactagaaagttacctaccaagtactaattagcatcttaaagtcagagcctgcagccccgggcctttcagttagttgtttactagaaaggacagtcttaagccagatacagtttaccataagaaaggttaaagaatcctagtgaagcaagttttttctttagccctagattccaggcagaactatttgagcatagataatttttccccctcaggccagccttttcttttttttttattttgttaataatagggaggagatgtagtctcccctcccccagcctgaaacctgcttgctcggggtggagcttcctgctcattcgttctgccacgcccactgctggaacctgaggagccacacacgtgcacctttctactggacccgagattattcggcgggaatcgggtcccctcccccttccttcataactagtgtcgcaacaataaaatttgagctttgatcagtatgaatttgtcttagctccgtttcttcttttgccccgtctagattcctctcttacagctcgagcggccttctcagtcgaaccgttcacgttgcgagctgctggcggccgcaaca

SEQ ID NO: 375 - DNA, 7076 bp, Artificial Sequence
  Description of Artificial Sequence: Synthetic polynucleotide
tgtagtctcccctcccccagcctgaaacctgcttgctcaggggtggagcttcctgctcattcgttctgccacgcccactgctggaacctgcggagccacacccgtgcacctttctactggaccagagattattcggcgggaatcgggtcccctcccccttccttcataactagtgtcgcaacaataaaatttgagccttgatcagagtaactgtcttggctacattttttcttccgccccgtctagattcctctcttacagctcgagcggccttctcagtcgaaccgttcacgttgcgagctgctggcggccgcaacattttggcgccagaactgggacttgaagaatggcagagagatgctaagaggaacgctgcattggagctccacaggaaaggatcttcgtatcagacatcggagcaacggacaggtacacatgctagcgctagcttaaaatttcagttttgtaaagtgttgctgaggatgcggtaggatacgaattaagcttgaatcagtgctaacccaacgctggttctgcttgggtcagcagcgtgttaatcggaactagaaacggaaacaggcaggttagccgcagctttttaggaagctgcttaggtggaagaagaaagggtttaaagtcatggatcaggcggtaggccgtagctctccgaagctacatgaggtgtgagaaaagaaagggtttattaaaaggaataggcgtattgccccagttaataaaaaatgcatcataagggaggaaaatgtcccaaaaagcagagagaaatatctctctgggccttatagcaggagtactctgttaccttttgtgtcttgtctaatgtccggtgcaccaatctgttctcgtgttcgattcatgtatgttcgtgtccagtctgtatgaatgaatgttctatgttttgtgttggataataaagatggtataaaaaactttatctgcaaagccgagagctgccacgtgtttcagccaggaatcagacacgtggcgagagggcccctgctggaaaaactgttcgttttaggaaataagggcgagtgcacagcctctaagtttcagagtaaaaaagctaataaatggttcatgattaatgtgtttgacaatggtaaagtgttttttattttatgattgtagctacaaaaattattattctctgattggtctaaatgtaactgcttcatttggttcctttttattggtaatgtgctctaagtgttttcacaatcagctcataagttgttggttaagattaataattgttacattgctacagatggttagtgttaaatttgataactcaagtttagagtccttccgacacatggcataaggcagcccaagaggctgtgtctctaaagatatttctagtttaggtaataattaatgtggatcgtatcctaaatagtaaaatttaaaataagatttaaagcaatgtctctttattaaagcattaaagcttgctttaataggtattcatacgtattaattgacatccaaacttcgtaatatgatagtaatgcttctaatattgattttaaagataataaattgttttaaacttgggttttgctttcccaaggttacaggtattatcctaaccttgcacaaaaacttaaaaattatggttaaaactgctattgttccattgactgcagcttgcagtttgatttcaaatttaagatctttaattcacctgtatactgtaattaagataattacaagagtaatcatcttatgagagcgctcatacagctcacttcatacaaaactgtgacagagttatctagttatgtttgtctttgtgaatagattagataaacagtttggttatagttgctgcctggcaggaaactgtagtacaggcaattttttcacaacactaaagttgtgaagaacgttttaactgtaagtcatcttaagaaagagtatcaaaatttagaggcgtagacagttatattgtttctctaaaatcggtccttattacaggagggccaggatgctcagattaaaaagtattttacgtttgagtcaatgcagggctctgggcagccccagagcggcttgtggcctttcttttgttttgcaaacagtgcctgaaaaaaatttttccctgtgttcaagagaaattctttttaacagtgttgcagatctattcagatgtttaaaataagacttaaattcaaagagttttgcttctagtgaactgtaatcactagaaaattttgcctctaagtatggctaatgtaactttacattatgtaagaaaaaattttattgtttctgcttctatacaagaagccaagagttttaatctttcagtgtatattgtttcctaagtgaaaagtattttattaactaatgcttcttgaagtttaccttaaatccttgctctcacccaaaagattcagagacaatatccttttattacttagggttttagtttactacaaaagtttctacaaaaaataaagcttttataattgttattaattggtaattaaaaattggttgtgcccaaaacaattctttggccaaaaagaaaacattattgtaaagtcatttttctcatcctcccagccaatcgttggcccacgtgggcccaactagcttctgtggggtggagtcttaagacacagtttcccctgttccagcacagatgatctagttgtgtgctgtagatggtgttttaaaatactgaacaatcaaaccttaatttgtatattaatagtcaatgccatatctctgagctcgcaattgcttaaattgttcatccctcagatactattaattctcaaatttacaattgcttatgcatatttctagttaataaataaataaattatgcacatgtaactcttaataactttacaagccttctagttacaactgctccttaagaaaattgattgaaagtgcaattagtcactgcccctttacagccatgtatttaaaatgttttgtcaactagttattaattcaaaagtttaggtattgtaaaattttaaaactttaacttcttaaaagacaaaaaagagagaaattgtatccccgtgcatactatttagtgcattcccatgcacactatctaagtcttacctttattttcaaaatttaatattttaatgtcaaagagtttaataaaggctttatagtatcttaaagggatctacttattggcttatagattaatcctaaaacaactaccttattagaaaagggaaaaacaggttttctccacagaacgctgcagaagcatattagtaaattcgtgtgacgagctggtaggtaagttgactcatgtcctgattgaattgactaaaaaactaaattaaattcatgttttagatccatccttacttgtcatttttccagtttagactagcttctagccttttaactttatgacaatagtacatcagagactgtatattcagacttagtaaaattagtcatttaatagagtcataatgatttttctcttttcttcagtgtgaccagctcttctaactcaatcttagactggtctaatattcagtccaatgttagagattcctatattctaaattacctagcaagttaattcagaacacatcctccacttcccctagatccctaacctcagaaggattactggccttacagctagtggaaaaggctattgaagaacagtttgtcacttacatagattactccctgccgctgcacctgttaatttttaatacgactcatgtgcctacgggattgctatggcaaaaatttcctataatgtggatacattcgaggatttctcccaaacgtaatatcttgccatatcacgaagcagtggctcagatgattatcactggaataaggcaggcattgacttattttggaaaggagccagatatcattgtccagccttacagcgtgagtcaggacacttggctgaaacagcatagtacagattggttgcttgcacaattagggtttgaaggaactctagatagccactacccccaagataggttgataaaattcttaaatgtgcatgatatgatatttcctaagatgacttccttacagcctttaaataatgctctattgatttttactgatggctcctctaaagggcgagctggatatcttattagtaatcaacaggttatcgtagagactcctggtctctcggctcagctcgccgaattaacagcagtactgaaggtttttcagtctgtgcatgaggcttttaatatttttactgacagtttatatgttgctcagtcagtacccttactggaaacctgtggtacgtttaacttcaatacgccgtcaggatctttattttcagaattacaaaacattctcgcccggaaaaatccgttttatattggccacatacggtctcactctggtcttcctggacctctggcagagggtaatgatcgcattgacagagctctaataggagaagccttagtttcagatcgggttgctttggcccaacgtgatcacgaaaggtttcatctttctagccataccctaagactccgacataagatcacaaaagagcaagcgagaatgatcgtaaaacaatgtcctaaatgtattactttatctccagtgccgcatctaggagttaatcctagaggccttatgcctaatcatatttggcaaatggatataacccattatacagaatttggaaaactaaaatatatacatgtctacattgatacttgttcaggatttctttttgcttctctgcatacaggagaagcttcaaaaaacgtaattgatcattgcctacaagcatttaatgccatgggattgcctaaacttattaagacagacaatgggccatcttattccagtaaaaactttatttcattctgtaaagaattcggtattaaacataaaactggaattccttacaaccccatgggacaaggaatagttgaacgtgctcatcgcaccttaaagaattggctttttaagacaaaagagggtcagctatatcccccaaggtcaccaaaggcccaccttgccttcactttatttgtcctaaatttcttgcacaccgatatcaagggccagtcagcagcggatcgccactggcatccagttacttctaattcttatgcattggtaaaatggaaagaccccctgactaatgaatggaagggtccagatccagttctaatttggggtaggggctcagtttgtgttttttcatgagatgaagatggagcgcggtggctgccagagagattaattcgtcagatgaacacagattctgactcttctggtaagtatcattctagagactaaaattccttttgtgcttaaaattcagctgagagcaacagctctcaaaggtgttctccagctactctctgaaccagctcccgacaggaggccggagactagcctcagctttacaatttgcatttgaataaagtacctagacttcccggaaagaagttctgctttcctactttctcactgtctttcaagattttgtctttcaagcaggtaaatcaacattcccgaggcggaccagtggatgtgcatccctgcccccctagagcacacaggtggcagctgttacccccagtctcaggacatttccagcatgtggctttcagtctgagttaaaaatttaggtttacctagagggctagaagagtagatttttctatattaataaagattggtttttattttgatagacaggcttagccccttagctgacctctggcttttcacccttgctgttactgcaaggtgtccttagctcaataggctgtggaaaaaacagggatgaggaggaacgacttccagctcctattttacccacaaatcgtggtgttattaacgacataattcttgcttaggctttgctaattctgaggttgataattctcctttaggagctgcacagcactcagaactgtgcatactggtttgtgattgtacaaattcagtatgggcaccgcttggtgcagagatacttactgcaagggaaggtccggcttgaccatttctgagtttcctgtgagataaacccggtttgaaagaggttggtaccaaattttggttaaaaataaaaaatattctccggctctacctcgcctccccaaaaggtaccaagagccacatgtgtgggttttacccacgggaggaatcgggtccatgtccacccaagccaaggttaaaagcccactcatctacggatgagaaaatcatttgatcacctcagttaagcgttgccttatttaacttaattaataggggggagagagattggagacgtactattgaaagggcaagcccttcactgcctcccacccaaataaaaaggccaattggccttgtactacaagagccggtcactccttctccctgtttcccacctatcttccaaaaatgcggaggaatatcaacttagtgctattttcacatcgttcagtcaaacttagccagagttccaacgccctacttaaaattcaactagaaagttacctaccaagtactaattagcattataaagtcagagtctgcagctccaggcctttcagttagttgtttactagaaaggacagtcttaagccagatacagtttaccataagaaaagttaaagaatcccagtgaagcaagttttttctttaaccctagattccaggcagaactattgagcatagataatttttcccccctcaggccagctttttctttttttattttgttaataatagggaggagatgtagtctcccctcccccagcctgaaacctgcttgctcaggggtggagcttcctgctcattcgttctgccacgcccactgctggaacctgcggagccacacccgtgcacctttctactggaccagagattattcggcgggaatcgggtcccctcccccttccttcataactagtgtcgcaacaataaaatttgagccttgatcagagtaactgtcttggctacattttttcttccgccccgtctagattcctctcttacagctcgagcggccttctcagtcgaaccgttcacgttgcgagctgctggcggccgcaaca

SEQ ID NO: 376 - DNA, 5543 bp, Artificial Sequence
  Description of Artificial Sequence: Synthetic polynucleotide
ttctacaaaaggctatactcaacaaaactggagaacctggaagaaatggagatgtttctagacagataccaggtaccaaagttgaatcaagatcaggttaatgatctaaacagtcctatatcccccaaagaaatagaagcagtcattaatagtctcccaaccaaaaaaatcccaggaccagatgggtttagtgcagagttctatcagaccttcaaagaagatctaatcccagttcttcacaaactattccacaaaatagaaacagatggtactctacccaacaaattctatgaagccacaattactctgatacctaaaacacaaaaagacccaacaaagatagagaacttcagaccaatttcccttatgcatattgatgcaaaatcctcaataaggttcttgctcactgaatccaagaacacatcaaaacaatcatccctccttaccaagtaggtttcatcccagcgatgcagggatggttcaatatatggaaatccatcaacataatccagtatataaacaaactcaaagacaaaaaccacatgatcatctcgttagatgctgagaaagcatttgacaaaatccaacacccattcatgataaaagtcttggaaagatcaggaattcaaggcccatacctaaacatgataaaagcaatctacagcaaaccagtagccaacatcaaagtaaatggtgagaaacttgaagcaataccactaaaatcagggactagacaaggctgtccactctctccctacctactcaacattgtacttgaagtcctagccagagcaattaaacaacaaaaggagatcaagaggatacaaattggaaaggaagaagtcaaaaatatcactctttgcagatgatatgatagtatatataagtgaccctaaaaattccaccagagaactcctaagcctgataaacagcttcggtgaagtagctggatataaaattaactcaaacaagtcaatggcctttctgtacacaaaggataaataggctgagaaagaaattagggaaacaacacccttctcaatagtcacaaataatataaaataccttggcgtgagtctaactaagaaagtgaaagatctgtatgataagaacttcatgtctctgaagaaagaaattagagaagatctcagaagatggaaagatctcccatgctcatggattggcaggatcaatatagtaaaaatggctatcttgctaaaaccatctaaagattcaacgcaatctccatgaaaattccaactcaattcttcaacaaattagaaagggcaatcggcagattcatctggaataacaaaaaacctaggatagcaaaaactcttctcaaggataaaagaacctctggtggaatcaccatgcccgacctaaagctgtactacagagcaattgtgattaaaaactgcatggtactggtatagtgacagacaagtagacaaatggaacagaattgaagacccagagatgaacccacacgtctatggtcacttgatctttgacaagggagctaaaaccatccagtggaaaaaagacagcattttcaacaaatggtgttggcacaactggctgttatcatgtagaagattgtgaattgatccattcatatctccttgtactaagatcaaatctaagtggatcaacataaaaccagagacagtgaaacttatagaggagaaagtagggaaaagcctcgaagatttgggtacaagagaaaaattcctgaatagaacagcaatggcttgtgctataagatcgagaaacgataaatgagacctcataaaattgcaaagcttctgcaaggcaaaagacaccgtcaataagacaaaagaccaccaacaaattgggaaaggatctttacctatcccaaattggatagggtactaacatccaatatatataaagaactcaagaaggtggactccagaaaatcaaataaccccattaaaaaatggggctcagaactgaacaaagaattctcacctgtggaataccgaatggcagagaagcacctgaaaaaatgttcaacatacttaaccatcaggaaaatgcaaatcaaaacaaccctgagattctacctcacaccagtcagaatggctaagatcaaaaattcaggtgagagcagatgctggtgaggatgtggagaaagaggaacactcctccatttttggtgggattgcaagcttgtacaaccactctggaaatcagtctggtggttcctcagaaaattggacatagtactaccggaggatccagcaatacctctcctgggcatatatccagaagatgtcccaaccggtaagaaggacactatgttcatagcagtgttatttttaatagccagaagctgggaagaacccagatgctcctcaacaggggtggatacagaaaatgtggtacatttacacaatggagtactactcagctattaaaaagaatgaatttatgaaattcctaggcacatggatggacctggagggcatcatcctgagtgaggtaacccaatcacaaaggaactcacacaatatatactcactgataagtggatattagcccagaatcttaggatacccaagatataagatacaatttgctaaacgcatgaaactcaagaagaatgaagacgagggtgtggggagtttgccccttcttagaattgggaacaaaaggggcgtggggggagttacagagacaaaattttgagctgtgatgaaaggcaatctagtgattgccatatccagggatccatcccataatcagcttccaaatgttgacaccattgcatactctagccagattttgctgaaaggactcagatatagctgtttcttgtgagacaatgccggggcctagcaaacacagaagtggatgctcccagtcagctattggatggatcacagggcccccaatgcaggagctagagaaagtacccaaggatctaaagggatttgcaaccctataggtggaacaacattatgaactaaccaataccccggagctcttgtctctagcttcatatgtatcaaaggatggcctagttggccatcattggaaagagaggcccattggacttgcaaactttatatgcctcagtacaggtgtaagccagggcgaaaaagggggagtgggtgggtaggggagtaggggggtgggtatgggggacttttgggatagcatcggaaatgtaaatgaggaaaatacctaattaaaaaaaaagagtttgaactagaaggaataagttttgcctagcatcagggaggtctatatgtggtttgggtgcccagaaagactgagtagttataatgccagaggtttcaaaaataggccaaagagaggcagattagtaatctctgtactgtaattgctgtggtggtaacacctgcatgaccaaataaatctctggggtttttggtccttcgaatggtgaaaatcatacatatttccacatcttggagtcaaaacttttgttgtgtgatactgatattcattcctgagccattttcctaagcttattggttgtgtgtgatataatattgtctagatgtctagacagtgcttgccttggtacagtacttggtgagaactcactgtcccacctgcttggctaacccccagttttagtgatttttttttttttactaagcttcaacatttacaataaacacatcttaaaaagtgtcgaaagaagtagtatattagaaattggagtgcattggatagatgaaaggttaaggtctttgaaatgaggtaggaagattttagaacacaaaggaccatgttaaccagagggacattgtgtgctcttgctcctttccttctgatcataagtcaagatggtttggagcagatattttgggattaatacccattcattcactcatttcttgagttctttctataatttgtcttctgacacattgtcctcagcaattccaaagtttaggttaaccctaaaaactttttccttcaaagtcaattttgtgaggagtggtagaacatgatattggcaatttatgcacagacttttacgtgtttaggtactgtcttgaactcttttcatgtttctttggtctgccttctccagttttgtggatgtttataattgtagtctcccctcccccagcctgaaacctgcttgctcggggtggagcttcctgctcattcgttctgccacgcccactgctggaacctgaggagccacacacgtgcacctttctactggaccagagattattcggcgggaatcgggtcccctcccccttccttcataactggtgtcacaacaataaaatttgagccttgatcagagtaactgtcttggctacatttcttcttttgccccgtctagattcctctcttacagctcgagcggccttctcagtcgaaccgttcacgttgcgagctgctggcggccgcaacattttggcgcccgaacagggacctgaagaatggcagagagatgctaagaggaacgctgcattggagctccacaggaaaggatcttcgtatcggacatcggagcaacggacaagtacacatgctagcgctagcttaaaatttcagttttgtaaagtgttgctgaggatgcggtaggatacgaattaagcttgaatcagtgctaacccaacgctggttctgcttgggtcagcagcgtgttaatcggaactagaaacggaaacaggcaggttagccgcagctttttaggaagctgcttaggtggaagaagaaagggtttaaagtcatggatcaggcggtaggccgtagctctccgaagctacatgaggtgtgagaaaagaaagggtttattaaaaggaataggcgtattgccccagttaataaaaaatgcatcataagggaggaaaatgtcccaaaaagcagagagaaatatctctctgggccttatagcaggagtactctgttaccttttgtgtcttgtctaatgtccggtgcaccaatctgttctcgtgttcgattcatgtatgttcgtgtccagtctgtatgaatgaatgttctatgttttgtgttggataataaagatggtataaaaaactttatctgcaaagccgagagctgccacgtgtttcagccaggaatcagacacgtggcgagagggcccctgctggaaaaactgttcgttttaggaaataagggcgagtgcacagcctctaagtttcagagtaaaaaagctaataaatggttcatgattaatgtgtttgacaatggtaaagtgttttttattttatgattgtagctacaaaaattattattctctgattggtctaaatgtaactgcttcatttggttcttttttattggtaatgtgctctaagtgttttcacaatcagctcataagttgttggttaagattaataattgttacattgctacagatggttagtgttaaatttgataactcaagtttagagtccttccgacacatggcataaggcagcccaagaggctgggtctctaaagatatttctagtttaggtaataattaatatggttcgtatcctaaatagtaaaattta

SEQ ID NO: 377 - DNA, 5536 bp, Artificial Sequence
  Description of Artificial Sequence: Synthetic polynucleotide
tcttaggtttccccaaagacagaaccatcaccccaaatcagcagtgaattgtttataaacacaatgaccttatttctgccccaccatcactcctttctagtttcttatatttaattaaaccaaaatcgatgaatattggtttacagacaattccactaggcttctctcaggaaactagctagcaacaggaacctagccatagcttacatcattacctgccacgaggtgctagccaggtatgtaagagaattgctagtacccagctctcactccatctcctattcactctgccccctacttcagtctctttctcttcagacaccacaaagtcaccccatgcaacagatctcatgggagaggtttattgggggaggaatatgtagaggctacctctgggtgaggttattaggggaacgaggatagggagaggagacactgcctttttatgcaggatataatgcatacaggtagaaaggatgcatgactcgtggcaacagtaaaattgtgtcacatcttgatggctggtgatgacctgtcctgctcttgcaagattgctggaattggggttagcaatgttcttagcatttctttttcttttcttttcttttattttattttcttttcttttcttttttctttttttgtttctttggggttttttttgtttttttttttgtttgtttgtttgttttgttttttgggggttttttgtttgtttgtttttcaagacagtgtttctctgtagccctggctggaactcactttgtagaccaggctagcctcgaaagaatccacctgcctctgcttcccaagtgctggaattaaaggcatacgccaccatgcccggcagcatttcttttaggctccactcaacaattacctggcaatagccaggtgggcttggcttgctgtaaaagaggctgtttgggctctccttgttctctctgcccccttttctatctttgactctctctttctctctctctctctctctctctctctctctctctctctctctctctctctctcacacacacacactttttccatctcttcccttccctttccacatgtccctggcttgcctctcttctcttgccctcttctcccttctcctgtcctctcctcacctgtcttcttctctctctctctctctctctctgtctctctctcagtttcagtttctctctgcttctctctctctctctctctctctctctctctctctctctctcactctctctctctgtctttctctgtctctactcctttctcctttcttatcccccttcccatgcccccaaataaactgtacctcagaggaaagggatacctcagcatgggcccactgaggcaacccttccaccacaccataccaccctgtataaaacatatacttggtttttataaaacacaacaggtgaagttttccaacagtttctttttaaaagtgtttttattacatttacttcacgtatgcacacttgtgtttgtatgtgtgtgtctgtctatctgtctgtgtgtgtgtctgtgtggcatgcctatggagagaccaataaactgaagttagttttttccttctattacttgtttcccaggtctaaacatgaaaacatattgtcaatcttggcagcaagtgcctttacctattgagccatctctccagttcttgtaaggattttcttggtctctaaatcaacattcttacacctactccattcaatataatgtggcatttgtttaactttcccccagaccatgaagtgataaagcttgactgagctcaacaaggaagatcaaagggaagtgacatttaagtatcagacttgagaagcaagcttgaaagcctctgagttctgcttggttatattcatcacgtagtcgtgaaaacctacatattccattgggttaaagagcagaaaatatgatacagaagatatgagtcttaagtcttgaacatttagataaatagatcttatgagaaattccttccacatctcaagaacaaatacagatgcagaaataagaactttgtgcctgtgaatagagggtaggaatgaagaaactggaaaacccttaaataatattttagttatggtatggtgtggtggaaggggtgcctcagtgggtccatgctgaggtatccctttcctctgaggtacagtttatttgggggcatgggaagggggataagaaaggagaaaggagtaaagacagagaaagacaaagagagtgagcgagagagagagagagagagagcaagagagagagagggagagagagagagagagagagagagagagagagagagagagagagaagaaataacagaggaaagatatttgaaagttgggtttagagtgtcttaaatgttggtaattagtgatcaattggtatataacaaggaacatcaaactcagtgatttaactctgctcacttcttttgtaggtcagaaatccacccatggcttagctgggtactctgtgtagtggtaccctagcacaattcaggttttagctgaggctgttattttatcattgtgataggtgcctctcccaacctcattcaaggtgttggtaggatttatcaccttgtggtagcataattggaatcctattttcttgccaactctctgaggaaggggtggttaacatttggaaggatttcatttacatattttctgaaagcactggaatttgttatttcttggcactctgcaggagagggtttaacacaaacgtttttgtttttatttctgtttctgttttactggctttatcaaatgatgcaaatccaccagaataataaaaattaacattgataaagtaaaaaatcaattaatatatgcatacaataacaattggtgtgttaataccaaagtttggaagagaaaaaccacctaccaaaatcatcacagccaaattaattaaagcaagcaatacatgacagtaagcttttttcttcctgtacatgggctgtctccagctcaaatagggattgagaggtcaaaattagatgtaaggaagacaatgttttttatagttaagggttaagtggttttctaatgggggaatttggcagacaaagtaggtcagtttacaagaacagagcataagcataacgagttagaaaggtgacccccccaaaacaaaggcatgattacaaggtggtcttaacaacaggaagccataacaagggagtccaactaactccagagattaccagatggctaaaggcaaatggaagaatcttactaacagaaaccactcatcaccataagaacccagcactccgaactcagccagtcctggataccccaaaacgcctgaaaagctagacccggagttaaaatcatatctcatgatgatggtagaggacatcaagaaggactttaataactcacttaaagaaatacaggagaacactgctaaagaggtacaagaccataaagaaaagcaggaaaacacaaccaaacagatgatggaactgaacaaaaccatagaagacgtaaaaagggaagtagacactgtagtctcccctcccccagcctgaaacctgcttgctcaggggtggagcttcctgctcattcgttctgccacgcccactgctggaacctgaggagccacacacgtgcacctttctactggaccagagattattcggcgggaatcgggtcccctcccccttccttcataactggtgtcgcaacaataaaatttgagccttgatcagagtaactgtcttggctacatttcttcttttgccccgtctagattcctctcttacagctcgagcggccttctcagtcgaaccgttcacgttgcgagctgctggcggccgcaacattttggcgccagaactgggacctgaagaatggcagagagatgctaagaggaacgctgcattggagctccacaggaaaggatcttcgtatcggacatcggagcaacggacaagtacacatgctagcgctagcttaaaatttcagttttgtaaagtgttgctgaggatgcggtaggatacgaattaagcttgaatcagtgctaacccaacgctggttctgcttgggtcagcagcgtgttaatcggaactagaaacggaaacaggcaggttagccgcagctttttaggaagctgcttaggtgaaagaagaaagggtttaaagtcatggatcaggcggtaggccgtagctctccgaagctacatgaggtgtgagaaaagaaagggtttattaaaaggaataggcggattgccccagttaataaaaaatacatcataagggaggaaaatgtcccaaaaagcagagagaaatatctctctgggccttatagcaggagtactctgttcccctttgtgtcttgtctaatgtccggtgcaccaatctgttctcgtgttcgattcatgtatgttcgtgtccagtctgtatgaatgaatgttctatgttttgtgttggataataaagatggtataaaaaactttatctgcaaagccgagagctgccacatgtttcagccaggaatcagacacgtggcaagagggcccctgctggaaaaactgttcgttttagaaaataagggcgagtgcacagcctctaagtttcagagtaaaaaagctaataaatggttcatgattaatgtgtttgacaatggtaaagtgttttttattttatgattgtagctacaaaaattattattctctgattggtctaaatgtaactgcttcatttggttcctttttattggtaatgtgctctaagtgttttcacaatcagctcataagttgttggttaagattaataattgttacattgctacagatggttagtgttaaatttgataactcaagtttagagtccttccgacacatggcataaggcagcccaagaggctgggtctctaaagatatttctagtttaggtaataattaatatggttcgtatcctaaatagtaaaatttaaaataagatttaaagcaatgtctctttattaaagcattaaagcttgctttaataggtattcataggtattaattgacatccaaacttcgtaatacgatagtaatgcttctaatattgattttaaagataataaattgttttaaacttgggttttactttcccaaggttataggtattatcctaaccttgcacaaaaaacttaaaaattatggttaaaactgctattgtttcattgactgcagcttgcagtttgatttcaaatttaagatctttaattcacctgtatactgtaattaagataattacaagagtaatcatcttatgagagtgctcatacagctcacttcatacaaaactgtgacagagttatctagttatgtttgtctttgtaaatagattagacagtttggttatagttgctgcctggcaggaaactgcagtacaggcaattttttcacaacactaaagttgtgaagaacgttttaactgtaagtcatcttaagaaagagtatcaaaatttggaggcgtagacagttatattgtttctctagaatcggtccttattacaggagggccaag

SEQ ID NO: 378 - DNA, 5538 bp, Artificial Sequence
  Description of Artificial Sequence: Synthetic polynucleotide
tgtagtctcccctcccctagcctgaaacctgcttgctcggggtggagcttcctgctcattcgttctgccacgcccactgctggaacctgaggagccacacacgtgcacctttctactggaccagagattattcggcgggaatcgggtcccctcccccttccttcataactggtgtcgcaacaataaaatttgagccttgatcagagtaactgtcttggctacatttcttcttttgccccgtctagattcctctcttacagctcgagcggccttctcagtcgaaccgttcacgttgcgagctgctggcggccgcaacattttggcgcccgaacagggacctgaagaatggcagagagatgctaagaggaacgctgcattggagctccacaggaaaggatcttcgtatcggacatcggagcaacggacaagtacacatgctagcgctagcttaaaatttcagttttgtaaagtgttgctgaggatgcggtaggatacgaattaagcttgaatcagtgctaacccaacgctggttctgcttgggtcagcagcgtgttaatcggaactagaaacggaaacaggcaggttagccgcagctttttaggaagctgcttaggtgaaagaagaaagggtttaaagtcatggatcaggcggtaggccgtagctctccgaagctacatgaggtgtgagaaaagaaagggtttattaaaaggaataggcggattgccccagttaataaaaaatacatcataagggaggaaaatgtcccaaaaagcagagagaaatatctctctgggccttatagcaggagtactctgttcccctttgtgtcttgtctaatgtccggtgcaccaatctgttctcgtgttcgattcatgtatgttcgtgtccagtctgtatgaatgaatgttctatgttttgtgttggataataaagatggtataaaaaactttatctgcaaagccgagagctgccacgtgtttcagccaggaatcagacacgtggcgagagggcccctgctggaaaaactgttcgttttagaaaataagggcgagtgcacagcctctaagtttcagagtaaaaaagctaataaatggttcatgattaatgtgtttgacaatggtaaagtgttttttattttatgattgtagctacaaaaattattattctctgattggtctaaatgtaactgcttcatttggttcttttttattggtaatgtgctctaagtgttttcacaatcagctcataagttgttggttaagattaataattgttacattgctacagatggttagtgttaaatttgataactcaagtttagagtccttccaacacatggcataaggcagcccaagaggctgggtctctaaagatatttctagtttaggtaataattaatatggttcgtatcctaaatagtaaaatttaaaataagatttaaagcaatgtctctttattaaagcattaaagcttgctttaataggtattcataggtattaattgacatccaaacttcgtaatacgatagtaatgcttctaatattgattttaaagataataaattgttttaaacttgggttttgctttcccaaggttataggtattatcctaaccttgcacaaaaaacttaaaaattatggttaaaactgctattgttccattgactgcagcttgcagtttgatttcaaatttaagatctttaattcacctgtatactgtaattaagataattacaagagtaatcatcttatgagagcgctcatacagctcacttcatacaaaactgtgacagagttatctagttatgtttgtctttgtgaatagattagacaaacagtttggttatagttgctgcctggcaggaaactgtagtacaggcaattttttcacaacactaaagttgtgaagaacgttttaactgtaagtcatcttaagaaagagtatcaaaatttagaggcgtagacagttatattgtttctctaaaatcggtccttattacaggagggccaggatgctcagattaaaaagtattttacgtttgagtcaatgcagggctctgggcagccccagagcggcttgtggcctttcttttgttttgcaaacagtgcctgagaaagatttttccctgtgttcaagaaaaattctttttaacagtgttgcagatctattcagatgtttaaaataatgcttaaattcaaagagttttgcttctagtgaactgtaatcactagaaaattttgcctctaggtatggctaatgtaactttacattatgtaagaaaaattttattgtttctgcttctatacaagaagccaagagttttaatctttcagtgtatattgtttcctaagtgaaaagtattttattaactaatgcttcttaaagtttaccttaaatccttgctctcacccaaaagattcagagacaatatccttttattacttagggttttagtttactacaaaagtttctacaaaaaataaagcttttataattgttattaattggtaattaaaaattggttgtgcccaaaacaattctttggccaaaaaaaaaaacattattgtaaagtcatttttctcatcctcccagccaatcgttggcccacgtgggcccaactagcttctgtggggcagagtcttaagacacagtttcccctgttccagcacagatgatctagttgtgtgctgtagatggtgttttaaaatgctgaacaatcaaaccttaatttgtatattaatagtcaatgccatatctctgagctcacaattgcttaaattgttcatccctcagatactattaattctcaaatttacaattgcttatgcatatttctagttaataaataaattatgcacatgtgactcttaataactttacaagccttctagttacaactgctccttaagaaaattgattaaaagtgcaattagtcactgcccctttacagccaagtatttaaaatgttttgtcaactagttattaattcaaaagtttaggtattgtaaaattttaaaactttaacttcttaaaagacaaaaaagagagaaattgtatccccgtgcatgctatttagtgcattcccatgcacactattaaagtcttacctttattttcaaaatctaatattttaatgtcaaagagtttaataaatgctttatagtatcttaaagggatctacttattggcttatagattaatcctaaaacagctaccttattaaaaaagggaaaaacaggttttctccacagaacgctgcagaagcatattaataaattcgtgtgacgagctggtaggtaagttgactcatgtcctgattaaattgactaaaaaactaaattaaattcatgttttagatccatccttacttgtcatttttccagtttagactagcttctagccttttaactttatgacaatagtacatcagagactgtatattcagacttagtaaaattagtcatttaatagagtcataatgatttttctcctttcttcagtgtgaccagccattctaactcaatcttagactggtcctaatattcagtccaatgttagagattcctatattctaaattacctagcaagttaattaaagagcaattggtcacttaataccccctgactaacaaatggaagggtccagatccagttctaatttggggtagggactcagtttgtgttttttcacgagatgaagatggagcgcggtggctgccagagagattaattcgtcagatgaacacagattctgactcttctggtaagtatcattctaaagactaaaattccttttgtgcttaaaattcagctgagagcaacagctctcaaaggtgttctccagctactctctgaaccagctcccgacaggaggccggagactagcctcagctttacaatttgcatttgaataaagtacctagacttcccggaaagaagttctgctttcctactttctcactgtctttcaagattttgtctttcaagcaggtaaatcaacattcccgaggcggaccagtagatgtgcatccccgcccccctagagcacacaggtggcagctgttacccccagtctcaggacatttccagcatgtggctttcagtctgagttaaaaatttaggtttacctagagggctagaagagtagatttttctatattaataaagattggtttttattttgatagacaggcttagccccttagctgacctctggcttttcacccttgctgttactgcaaggtgtccttagctcaataggctgtggaaaaaacagggatgaggaggaacgacttccagctcctattttacccacaaatcgtggtgttattaacgacataattcttgcttaggctttgctaattctgaggttgataattctcctttaggagctgcacagcactcagaactgtgcatactggtttgtgattgtacaaattcagtatgggcaccgcttggtgcagagatacttactgcaagggaaggtccggcttgaccatttctgagtttcctgtgagataaacccggtttgaaagaggttggtaccaaattttggttaaaaataaaaaatattctccggctctacctcgcctccccaaaaggtaccaagagccacatgtgtgggttttacccacgggaggaatcgggtccatgtccacccaagccaaggttaaaagcccactcatctacggatgagaaaatcatttgatcacctcagttaagcgttgccttatttaacttaattaataggggggagagagattggagacgtactattgaaagggcaagcccttcactgcctcccacccaaataaaaaggccaattggccttgtactacaagagccggtcactccttctccctgtttcccacctatcttccaaaaatgctaaggaattcaacttagtgttattttcacatcgttcagtcaaacttagccagagttccaaacgccctacttaaaattcaactagaaagttacctaccaagtactaattagcattataaagtcagagtctgcagctccaggcctttcagttgtttactagaaaggacagtcttaagccagatacagtttaccataagaaaagttaaagattcccagtgaagcaagttttttctttagccctagattccaggcagaactattgagcatagataattttcccccctcaggccagctttttctttttttttttattttgttaataacagggaggagatgtagtctcccctcccctagcctgaaacctgcttgctcggggtggagcttcctgctcattcgttctgccacgcccactgctggaacctgaggagccacacacgtgcacctttctactggaccagagattattcggcgggaatcgggtcccctcccccttccttcataactggtgtcgcaacaataaaatttgagccttgatcagagtaactgtcttggctacatttcttcttttgccccgtctagattcctctcttacagctcgagcggccttctcagtcgaaccgttcacgttgcgagctgctggcggccgcaaca

SEQ ID NO: 379 - DNA, 5497 bp, Artificial Sequence
  Description of Artificial Sequence: Synthetic polynucleotide
tgtagtctcccctcccctagcctgaaacctgcttgctcaggggtggagcttcctgctcattcgttctgccacgcccactgctggaacctgcggagccacacacgtgcacctttctactggaccagagattattcggcgggaatcgggtcccctcccccttccttcataactagtgtcgcaacaataaaatttgagccttgatcagagtaactgtcttggctacattcttttctctcgccacctagcccctcttctcttccaggtttccaaaatgcctttccaggctagaacccaggttgtggtctgctggccggacacaacaattggcgaaccaacgtgggactgagaaacggcaaaggatttttggaagagatgctgctggttcggagctccataaaataaaggataagggaaattcataccggagaaggtatgggctaagctgagacagcgttaaacccgagcgctggttcacttaggttcagcagtgaggagctgggtatcaggcggtaggccgtagctctccgaagctacatgaggtgtgagaaaagaaagggtttattaaaaggaataggcggattgccccagttaataaaaaatgcatcataagggaggaaaatgtcccaaaaagcagagagaaatatctctctgggccttatagcaggagtactctgttcccttttgtgtcttgtctaatgtccggtgcaccaatctgttctcgtgttcaattcatgtatgttcgtgtccagtctgtatgaatgaatgttctatgttttgtgttggataataaagatggtataaaaaactatctgcaaagccgagagctgccacgtgtttcagccaggaatcagacacgtggcgagagggcccctgctggaaaaactgttcgttttaggaaataagggcgagtgcacagcctctaagtttcagagtaaaaaagctaataaatggttcatgattaatgtgtttgacaatggtaaagtgttttttatttttatggttgtagctacaaaaattattattctctgattggtctaaatgtaactgcttcatttggttcttttttattggtaatgtgctctgagtgttttcacaatcagctcataagttgttggttaagattaataattgttacattgctacagatggttagtgttaaatttgataactcaagtttagagtccttccgacacgtggcataaagcaggccaagaggctgggtctctaaagatatttctagtttaggtaataattaatgtggttcgtatcctaaatagtaaaatttaaaataagatttaaagcaatgtctctttattaaagcattaaagcttgctttaataggtattcataggtattaattgacatccaaacttcgtaatatgatagtaatgcttctaatattgattttaaagataataaattgttttaaacttgggttttgctttcccaaggttataggtattatcctaaccttgcacaaaaaacttaaaaattatggttaaaactgctattgttccattgactgcagcttgcagtttgatttcaaatttaagatctttaattcacctgtatactgtaattaagataattacaagagtaatcatcttatgagagcgctcatacagctcacttcatacaaaactgtgacagagttatctagttatgtttgtctttgtaaatagattagacaaacagtttggttatagttgctgcctggcaggaaactgcagtacgggcaattttttcacaacactaaagttgtgaagaacgttttaactgtaagtcatcgtaagaaagagtatcataatttagaggcatagacagttatattgtttctctagaatcggtccttattacaggagggccaagatgctcagattaaaaagtattttacgtttgagtcaatgcagggctctgggcagccccagagcggcttgtggcctttcttttgttttgcaaacagtgcctgagaaagatttttccctgtgttcaagagaaattctttttaacagtgttgcagatctattcagatgtttaaaataatgcttaaattcaaagagttttgcttctagtgaactgtaatcactagaaaattttgcctctaggtatggctaatgtaactttacattatgtaagaaaaaattttattgtttctgcttctatacaagaagccaagagttttaatctttcagtgtatattgtttcctaagtgaaaagtattttattaactaatgcttcttaaagtttaccttaaatccttgctctcacccaaaagattcagagacaatatccttttattacttagggttttagtttactacaaaagtttctacaaaaaagaaagcttttataattgttattaattggtaattaaaaattggttgtgcccaaaacaattctttggccagaaaaaacattattgtaaagtcatttttctcatcctcccagccaatcgttggcccatgtgggcccaactagcttctgtggggcggagtcttaagacacagttttccctgttccagcacagatgatctagttgtgtgctgtagatggtgttttaaaatgctgaacaatcaaaccttaatttgtatattaatagtcaatgccatatctctgagctcgcaattgcttaaattgttcatccctcagatactattaattctcaaatttacaattgcttatgcatatttctagttaataaataaattatgcacatgtgactcttaataactttgcaagccttctagttacaactgctccttaagaaaattgattaaaagtgcaattagtcactgcccctttacagccatgtatttaaaatattttgtcaactagttattaattcaaaagtttaggtattataaaattttaaaactttaacttcttaaaagacaaaaaagagagaaattgtatccccgtgcatgctatttagtgcattcccatgcacactattaaagtcttacctttattttcaaaatctaatattttaatgtcaaagagtttaataaatgctttatagtatcttaaagggatctacttattggcttatagattaatcctaaaacaactaccttattagaaaagggaaaaacaggttttctccacagaacgctgcagaagcatattagtaaattcgtgtgacgagctggtaggtaagttgactcatgtcctgattgaattgactaaaaaactaaattaaattcatgttttagatccatccttacttgtcatttttccagtttagactagcttctagccttttaactttatggcaatagtacatcagagactgtatattcagacttagtaaaattagtcatttaatagagtcataatgatttttctcctttcttcagtgtgaccagccattctaactcaatctcagactggtctaatattcagtccaatgttagagattcctatattctaaattacctaacaaagttaattcagagcacatcccccacttcccctagatccctaacctcagaaggattgctggccttacagctagtggaaaaagctattaaagagcaattggtcacttaatacattggtaaaatagaaggaccccctgactaacgaatagaagggtccagatccagttctaatttggggtagggactcagtttgtgttttttcacgagatgaagatagagcgcagtggctgccagataaattaatttgttagatgaacacagattctaaatcttctaaagtatcaccttgaggactaaaattcctcttttgcttaaaagtcggcttgaggactcaggctccgaaaaaagctactctctgagccagctcctgacaggaggccggagactagcctcagctttacaatttgcatttaaataaagtacctagagttccccaaaagaagttctgctttcctactttctcactgtccgagattttgtctttcaagcaggtaaatcaacattctcgaggcggaccagcggatgtgcatccccgcccccctagcgcacacaggtggctgctgttatctcctttccaaggacatttccagcatgtggctttcagtctgagttaaaaattaggtttaccaagagggctagaaaagtagatatttctatattaataaagattggtttttattttgatagacaggcttagtcccttagctgacctctggcttttcacccttgctgttactgcaaggtgtccttaggctgtggaaaaaacagggatgaggagaaacgacttccagctcctattttagccacaaatcgtggtgttactaatgacataattcttgcttaggctttgctaattctgaggttgataattctcctttaggagctgcacagcactcagaaatgtgcatactggtttgtgattgtacaaattcagtatgggcatcgcttggtgcagaggtactgcaagggaaggtccggcttgaccatttctgagtttcctgtgagataaacccggtttaaaagaggttggtatcatattttggttaaaaatcaaaaatattttccggctctgcctcgcctccccaaaagatacccagagtcacatgtgtgggtcttatcaatacccacgggaggaatcgggtccatgtccacccaagccaaggttaaaagcccactcatctacggatgagaaaatcatttgatcacctcagttaagcgttgccttatttaacttaatcaataggggggagagagattggagacgtactattgaaagggcaagcccttcactgcctcccacccaaataaaaaagccaattggccttgtactacaagagccggtcgaactccttctccctgtttcccacctatcttccaaaaaagcggagaaatatcaacttagtgttattatagtgtatttcacatttgttcagtcaaacttagccagagttccaacgccctacttaaaattcaactagaaagttacctaccaagtactaattagcattataaagtcagagcctacagctccaggcttttcagttagttgttcactaagataagaaaggacagtcttagccttatacagtttaccataagaaaagttaaggaatcccatgaaagcaagttttttctttagccctagattccaggcagaactattgagcatagataatttttcccccctcaggccagctttttctttttttaaattttgttaataaaagggaggagatgtagtctcccctcccctagcctgaaacctgcttgctcaggggtggagcttcctgctcattcgttctgccacgcccactgctggaacctgcggagccacacacgtgcacctttctactggaccagagattattcggcgggaatcgggtcccctcccccttccttcataactagtgtcgcaacaataaaatttgagccttgatcagagtaactgtcttggctacattcttttctctcgccacctagcccctcttctcttccaggtttccaaaatgcctttccaggctagaacccaggttgtggtctgctggccggacacaaca

SEQ ID NO: 380 - DNA, 7072 bp, Artificial Sequence
  Description of Artificial Sequence: Synthetic polynucleotide
tgtgttgggagccgcccccacattcgccgttacaagatggcgctgacatcctgtgttctaagtggtaaacaaataatctgcgcatgtgccaagggtatcttatgactacttgtgctctgccttccccgtgacgtcaactcggccgatgggctgcagccaatcaaggagtgacacgtccgaggcgaaggagaatgctccttaagagggacggggttttcgttttctctctctcttgcttcttgctctcttttcctgaagatgtaagaataaagctttgccgcagaagattctggtctgtggtgttcttcctggccggtcgtgagaacgcgtctaataacaattggtgccgaattccgggacgagaaaatccgggacgagaaaaaactccggactggcgcaggagggatacttcattccagaaccagaactgcgaatcaaggttataaggttcccgtaacacagactgttgagaaggattcaactgccgaattcagaactcatcagctggggaacgacggtgataaaggttcccgtaaagcagactgttaagaaggattcaactgtatgaattcagaacttttcagctggggaacgagagtaccagtgagtatgtttggccttgaattttttctggtgttaggagcccttttgttctttttcacatgctatcaagtgattaagatagggctgaaaattctagaggaaattcaggacaagctatcagaagtaaagcgggaagaaagagtaggaacaaagagaaaatatggttcacaaaataagtatacaggcctttccaagggtcttgaacccgaggaaaagttaaggttaggtaggaatacctggagagagattagaagaaaaagaggaaaaagggagaagaaaaaagatcgattagcggaggtctctaggagatactcgtcactagatgagctcaggaagccagctcttagtagctctgaagcagatgaagaatcctcctctgaggaaacagactgggaggaagaagcagcccattaccagccagctaatcggtcaagaaaaaagccaaaagcggctggcgaaggccagtttgctaattggcctcagggcaatcggctaccaggtgcactcccgccctatgcggagtccccgccctgcgtagtgcgtcagcccgtagtgcgtcagcaatgcgcagagaggcagtgcgcagactcattcattccccgagaggaacaaaggaaaatagaacaggcatttccagtctttgaaggagccgagggtgggcgtgtccacgctccggtagaatacgtacagattaaggaaattgccgagtcggttcgtaaatacggaaccaatgctaattttaccttggtgcagttagacaggctcgctggcatggcactaactcctgctgactggcaaacggttgtaaaagccgctctccctagtatgggcaaatatatggaatggaaagcgctttggcacgaagctgcacaggcgcaggcccgagcaaacgcagctgctttgactccagagcagagagattggacttttgacttgttaacgggtcagggagcttattctgctgatcagacaaactaccattggggagcttatgcccagatttcttccacggctattagggcctggaaggcgctctctcgagcaggtgaaaccactggtcagttaacaaaaataatccagggacctcaggaatccttctcagattttgtggccagaatgacagaggcagcagagcgtatttttggagagtcagagcaagctgcgcctctcatagaacagctaatctacgagcaagccacaaaggagtgccgagcggccatagccccaagaaagaacaaaggcttacaagactggctcagggtctgtcgagagcttgggggacccctcagcaatgcaggtttagcggctgccatccttcaatcccaaaaccgctccatgggcagaaatgatcagaggacatgttttaactgcggaaagcctgggcattttaagaaagattgcagagctccagataaacagggagggactctcactctttgctctaagtgtggcaagggttatcatagagctgaccagtgtcgctctgtgagggatataaagggcagaattcttcccccacctgatagtcaatcaactgatgtgccaaaaaacgggtcatcgggccctcggtcccagggccctcaaagatatgggaaccggtttgtcaggacccagggggcagtcagagaggcgacccaggaagacccacaagggtggacctgcgtgccgcctccgacttcctactaatgcctcaaatgagtattcagccggtgccggtggagcctataccatccttgcccccgggaaccatgggccttattctcggccgaggttcactcaccttgcagggcttagtagtccaccctggagttatggattgtcaacattcccctgaaatacaggtcctgtgctcaagccctaaaggcgttttttctattagtaaaggagataggatagctcagctgctgctcctccctgataataccagggagaaatctgcaggacctgagataaagaaaatgggctcctcaggaaatgattctgcctatttggttgtatctttaaatgatagacctaagctccgccttaagattaatggaaaagagtttgaaggcatccttgataccggagcagataaaagtataatctctacacattggtggcccaaagcatggcccaccacagagtcatctcattcattacagggcctaggatatcaatcatgtcccactataagctccgttgccttgacgtgggaatcctctgaagggcagcaagggaaattcataccttatgtgctcccactcccggttaacctctggggaagggatattatgcagcatttgggccttattttgtccaatgaaaacgccccatcaggagggtattcagctaaagcaaaaaatatcatggcaaagatgggttataaagaaggaaaagggttaggacatcaagaacagggaaggatagagcccatctcacctaatggaaaccaagacagacagggtctgggttttccatagcggccattggggcagcacgacccataccatggaaaacaggggacccagtgtgggttcctcaatggcacctatcctctgaaaaactagaagctgtgattcaactggtagaggaacaattaaaactaggccatattgaaccctctacctcaccttggaatactccaatttttgtaattaagaaaaagtcaggaaagtggagactgctccatgacctcagagccattaatgagcaaatgaacttatttggcccagtacagaggggtctccctgtactttccgccttaccacgtggctggaatttaattattatagatattaaagattgtttcttttctatacctttgtgtccaagagataggcccagatttgcctttaccatcccctctattaatcacatggaacctgataagaggtatcaatggaaggtcttaccacagggaatgtccaatagtcctacaatgtgccaactttatgtgcaagaagctcttttgccagtgaggaaacagttcccctctttaattttgctcctttacatggatgacatcctcctgtgccataaagaccttaccatgctacaaaaggcatatccttttctacttaaaactttaagtcagtggggtttacagatagccacagaaaaggtccaaatttctgatacaggacaattcttgggctctgtggtgtccccagataagattgtgccccaaaaggtagagataagaagagatcacctccataccttaaatgattttcaaaagctgttgggagatattaattggctcagaccctttttaaagattccttctgctgaattaaggcctttgtttagtattttagaaggagatcctcatatctcctcccctaggactcttactctagctgctaaccaggccttacaaaaagtggaaaaagccttacagaatgcacaattacaacgtattgaggattcgcagcctttcagtttgtgtgtctttaagacagcacaattgccaactgcagttttgtggcagaatgggccattgttgtggatccatccaaacgtatccccagctaaaataatagattggtatcctgatgcaattgcacagcttgcccttaaaggcctaaaagcagcaatcacccactttgggcaaagtccatatcttttaattgtaccttataccgctgcacaggttcaaaccttggcagccgcatctaatgattgggcagttttagttacctccttttcaggaaaaatagataaccattatccaaaacatccaatcttacagtttgcccaaaatcaatctgttgtgtttccacaaataacagtaagaaacccacttaaaaatgggattgtggtatatactgatggatcaaaaactggcataggtgcctatgtggctaatggtaaagtggtatccaaacaatataatgaaaattcacctcaagtggtagaatgtttagtggtcttagaagttttaaaaacctttttaaaaccccttaatattgtgtcagattcctattatgtggttaatgcagtaaatcttttagaagtggctggagtgattaagccttccagtagagttgccaatatttttcagcagatacaattagttttgttatctagaagatctcctgtttatattactcatgttagagcccattcaggcctacctggccccatggctctgggaaatgatttggcagataaggccactaaagtggtggctgctgccctatcatccccggtagaggctgcaagaaattttcataacaattttcatgtgacggctgaaacattacgcagtcgtttctccttgacaagaaaagaagcccgtgacattgttactcaatgtcaaagctgctgtgagttcttgccagttcctcatgtgggaattaacccacgcggtattcgacctctacaggtctggcaaatggatgttacacatgtttcttcctttggaaaacttcaatatctccatgtgtccattgacacatgttctggcatcatgtttgcttctccgttaactggagaaaaagcctcacatgtgattcaacattgtcttgaggcatggagtgcttgggggaaacccagactccttaagactgataatggaccagcttatacgtctcaaaaattccaacagttctgccgtcagatggacgtgacccacctgactggacttccatacaaccctcaaggacagggtattgttgagcgtgcgcatcgcaccctcaaagcctatcttataaaacagaagaggggaacttttgaggagactgtaccccgagcaccaagagtgtcggtgtctttggcactctttacacttaattttttaaatattgatgctcatggccatactgcggctgaacgtcattgttcagagccagataggcccaatgagatggttaaatggaaaaatgtccttgataataaatggtatggcccggatcctatcttgataagatccaggggagctatctgtgttttcccacagaatgaagacaacccattttgggtaccagaaagactcacccgaaaaatccagactgaccaagggaatactaatgtccctcgtcttggtgatgtccagggcgtcaataataaagagagagcagcgttgggggataatgtcgacatttccactcccaatgacggtgatgtataatgctcaagtattctcctgcttttttaccactaactaggaactgggtttggccttaattcagacagccttggctctgtctggacaggtccagatgactgacaccattaacactttgtcagcctcagtgactacagtcatagatgaacaggcctcagctaatgtcaagatacagagaggtctcatgctggttaatcaactcatagatcttgtccagatacaactagatgtattatgacaaataactcagcagggatgtgaacaaaagtttccgggattgtgtgttatttccattcagtatgttaaatttactagggcagctaatttgtcaaaaagtctttttcagtatatgttacagaattggatggctgaatttgaacagacccttcgaggcttgccatcattcaggtcaactccacgcgcttggacctgtccctgaccaaaggattacccaattggatctcctcagcattttctttctttaaaaaatgggtgggattaatattatttggagatacactttgctgtggattagtgttgcttctttgattggtctgtaagcttaaggcctaaactaggagagacaaggtggttattgcccaggcgcttgcaggactagaacatggagcttcccctgatatatctatgcttaggcaataggtcgctggccactcagctcttatatctcacgaggctagtctcattgcacgagatagagtgagtgtgcttcagcagcccgagagagttgcaaggctaagcactgcaatggaaaggctctgcggcatatatgagcctattctagggagacatgtcatctttcatgaaggttcagtgtcctagttcccttcccccaggcaaaacgacacgggagcaggtcagggttgctctgggtaaaagcctgtaagcctaagagctaatcctgtacatggctcctttacctacacactggggatttgacctctatctccactctcattaatatgggtggcctatttgctcttattaaaagaaaaagggggagatgttgggagccgcccccacattcgccgttacaagatggcgctgacatcctgtgttctaagtggtaaacaaataatctgcgcatgtgccaagggtatcttatgactacttgtgctctgccttccccgtgacgtcaactcggccgatgggctgcagccaatcaaggagtgacacgtccgaggcgaaggagaatgctccttaagagggacggggttttcgttttctctctctcttgcttcttgctctcttttcctgaagatgtaagaataaagctttgccgcagaagattctggtctgtggtgttcttcctggccggtcgtgagaacgcgtctaataaca

SEQ ID NO: 381 - DNA, 7086 bp, Artificial Sequence
  Description of Artificial Sequence: Synthetic polynucleotide
tgttgggagccgcgcccacattcgccgttacaagatggcgctgacagctgtgttctaagtggtaaacaaataatctgcgcatgtgccaagggtatcttatgactacttgtgctctgccttccccgtgacgtcaactcggccgatgggctgcagccaatcagggagtgacacgtccgaggcgaaggagaatgctccttaagagggacggggtttcgttttctctctctcttgcttcttgctctcttgcttcttacacgcttgctcctgaagatgtaagaaataaagctttgccgcagaagattctggtctgtggtgttcttcctggccggtcgtgagaacgcgtctaataacaattggtgccgaattccgggacgagaaaaaactcgggactggcgcaaggaagatccctcattccagaaccagaactgcgggtcgcggtaataaaggttcccgtaaagcagactgttaagaaggattcaactgtatgaattcagaacttttcagctggggaacgagagtaccagtgagtacagctttacgaggtaagtccgatcttgaactttctaacgaaattcaagacagtctatcagaagtaaagtggaatatgtttggccttgaattttttctggtgttaggagcccttttgttccttttcacatgttatcaagtgattaagatagggctgaaaattctagaggaaattcaggacaagctatcagaagtaaagcggggagagagagtaggagcaaagaggaaatatggtacacaaaataagtatacaggcctttccaagggtcttgaacccgaggaaaagttaaggttaggtaggaatacctggagagagattagaagaaaaagaggaaaaagggaaaagaagaaagatcaattagcggaggtctctaggagatactcgtcactagatgagctcaggaagccagctcttagtagttctgaagcaggtgaagaatcctcctctgaggaaacagactgggaggaagaagcagcccattaccagccagctaattggtcaagaaaaaagccaaaagcggctggcgaaggccagtttgctgattggcctcagggcagtcggcttcaaggtccgccctatgcggagtccccgccctgcgtagtgcgtcagcaatgcgcagagagatgcgcagagaggcagtgcgcagagaggcagtgcgcagactcattcattcccagagaggaacaaaggaaaatacaacaggcatttccggtctttgaaggagccgagggtgggcgtgtccacgctccggtagaatacttacaaattaaagaaattgccgagtcggttcgtaaatacggaaccaatgctaattttaccttggtgcagttagacaggctcgctggcatggcactaactcctgctgactggcaaacggttgtaaaagccgctctccctagtatgggcaaatatatggaatggagagcgctttggcatgaagctgcacaagcgcaggcccgagcaaacgcagctgctttgactccagagcagagagattggacttttgacttgttaacgggtcagggagcttattctgctgatcagacaaactaccattggggagcttatgcccagatttcttccacggctattagggcctggaaggcgctctctcgagcaggtgaaaccactggtcagttaacaaagataatccagggacctcaggaatccttctcagattttgtggccagaatgacagaggcagcagagcgtatttttggagagtcagagcaagctgcgcctctgatagaacagctaatctatgagcaagccacaaaggagtgccgagcggccatagccccaagaaagaacaaaggcttacaagactggctcagggtctgtcgagagcttgggggacctctcaccaatgcaggcttagcggccgccatcctccaatctcagaaccgctccatgagcagaaatgatcagaggacatgttttaattgcggaaagcctgggcattttaagaaagattgcagagctccagataaacagggagggactctcactctttgctctaagtgtggcaagggttatcatagagctgaccagtgtcgctctgtgagggatataaagggcagaattcttcccccacctgatagtcaatcaactgatgtgccaaaaaacgggtcatcgggccctcggtcccagggccctcaaagatatgggaaccggtttgtcaggacccaggaagcagtcagagaggcgacccaggaagacccacaagggtggacctgcgtgccgcctccgacttcctattaatgcctcaaatgagtattcagccggtgccagtggagcctataccatccttgcccccgggaaccatgggccttattctcggccggggttcactcaccttgcagggcttagtagtccaccctggagttatggattgtcaacattcccctgaaatacaggtcctgtgctcaagccctaaaggcgttttttctattagtaaaggagataggatagctcagctgctgctcctccctgataataccagggaaaaatctgcaggacctgagataaagaaaatgggctcctcaggaaatgattctgcctatttggttgtatctttaaatgatagacctaagctccgccttaagattaatggaaaagagtttgaaggcatccttgataccggagcagataaaagtataatttctacacattggtggcccaaagcatggcccaccacagagtcatctcattcattacagggcctaggttatcaatcatgtcccactataagctccattgccttgacgtgggaatcctctgaagggcagcaagggaaattcataccttatgtgctcccactcccggttaacctctggggaagggatattatgcagcatttgggccttattttgtccaatgaaaacgccccatcgggagggtattcaactaaagcaaaaaatatcatggcaaagatgggttataaagaaggaaaagggttaggacatcaagaacagggaaggatagagcccatctcacctaatggaaaccaagacagacagggtctgggtttttccttagcggccattggggcagcacgacccataccatggaaaacaggggacccagtgtgggttcctcaatggcacctatcctctgaaaaactagaagctgtgattcaactggtagaggaacaattaaaattaggccatattgaaccctctacctcaccttggaatactccaatttttgtaattaagaaaaagtcaggaaagtggagactgctccatgacctcagagccattaatgagcaaatgaacttatttggcccagtacagaggggtctccctgtactttccgccttaccacgtggctggaatttaattattatagatattaaagattgtttcttttctatacctttgtgtccaagggataggcccagatttgcctttaccatcccctctattaatcacatggaacctgataagaggtatcaatggaaggtcttaccacagggaatgtccaatagtcctacaatgtgccaactttatgtgcaagaagctcttttgccagtgagggaacaattcccctctttaattttgctcctttacatggatgacatcctcctgtgccataaagaccttaccatgcttcaaaaggcatatccttttctacttaaaactttaagtcagtggggtttacagatagccacagaaaaggtccaaatttctgatacaggacaattcttgggctctgtggtgtccccagataagattgtgccccaaaaggtagagataagaagagatcacctccataccttaaatgattttcaaaagctgttgggagatattaattggctcagaccttttttaaagattccttccgctgagttaaggcctttgtttagtattttagaaggagatcctcatatctcctcccctaggactcttactctagctgctaaccaggccttacaaaaagtggaaaaggccttacagaatgcacaattacaacgtattgaggattcgcaacctttcagtttgtgtgtctttaagacagcacaattgccaactgcagttttgtggcagaatgggccattgttgtggatccatccaaacgtatccccagctaaaataatagattggtatcctgatgcaattgcacagcttgcccttaaaggtctaaaagcagcaatcacccactttgggcaaagtccatatcttttaattgtaccttataccgctgcacaggttcaaaccttggcagccacatctaatgattgggcagttttagttacctccttttcaggaaaaatagataaccattatccaaaacatccaatcttacagtttgcccaaaatcaatctgttgtgtttccacaaataacagtaagaaacccacttaaaaatgggattgtggtatatactgatggatcaaaaactggcataggtgcctatgtggctaatggtaaagtggtatccaaacaatataatgaaaattcacctcaagtggtagaatgtttagtggtcttagaagttttaaaaacctttttagaaccccttaatattgtgtcagattcctgttatgtggtaaatgcagtaaatcttttagaagtggctggagtgattaagccttccagtagagttgccaatatttttcagcagatacaattagttttgttatctagaagatctcctgtttatattactcatgttagagcccattcaggcctacctggccccatggctctgggaaatgatttggcagataaggccactaaagtggtggctgctgccctatcatccccggtagaggctgcaagaaattttcataacaattttcatgtgacggctgaaacattacgcagtcgtttctccttgacaagaaaagaagcccgtgacattgttactcaatgtcaaagctgctgtgagttcttgccagttcctcatgtgggaattaacccacgcggtattcgacctctacaggtctggcaaatggatgttacacatgtttcttcctttggaaaacttcaatatctccatgtgtccattgacacatgttctggcatcatgtttgcttctccgttaaccggagaaaaagcctcacatgtgattcaacattgtcttgaggcatggagtgcttgggggaaacccagactccttaagactgataatggaccagcttatacgtctcaaaaattccaacagttctgccgtcagatggacgtaacccacctgactggacttccgtacaaccctcaaggacagggtattgttgagcgtgcgcatcgcaccctcaaagcctatcttataaaacagaagaggggaacttttgaggagactgtaccccgagcaccaagagtgtcggtgtctttggcactctttacactcaattttttaaatattgatgttcatggccatactgcggctgaacgtcattgttcagagccagataggcccaatgagatggttaaatggaaaaatgtccttgataataaatggtatggcccggatcctatcttgataagatccaggggagctgtctgtgttttcccacagaatgaagacaacccattttgggtaccagaaagactcacccgaaaaatccagactgaccaagggaatactaatgtccctcgtcttggtgatgtccagggcgtcaataataaagagagagcagcgttgggggataatgtcgacatttccactcccaatgacggtgatgtataatgctcaagtattctcctgcttttttaccactaactaggaactgggtttagccttaattcagacagccttagctctgtctggacaggtccagacgactgacaccattaacactttgtcagcctcagtgactacagtcatagataaacaggcctcagctaatgtcaagatacagggaggtctcatgctggttaatcaactcatagatcttgtccagatacaactagatgtattatgacaaataactcagcagggatgtgaacaaaagtttccgggattgtgtgttatttccattcagtatgttaaatttactaggacagctaatttgtcaaaaagtctttttcagtatatgttacagaattggatggctgaatttgaacagatccttcgggaattgagacttcaggtcaactccacgcgcttggacctgtcgctgaccaaaggattacccaattggatctcctcagcattttctttctttaaaaaatgggtgggattaatattatttggagatacactttgctgtggattagtgttgcttctttgattggtctgtaagcttaaggcccaaactaggagagacaaggtggttattgcccaggcgcttgcaggactagaacatggagcttcccctgatatatctatgcttaggcaataggtcgctggccactcagctcttatatcccatgaggctagactcattgcacgggatagagtgagtgtgcttcagcagcccgagagagttgcaaggctaagcactgcaatggaaaggctctgcggcatatatgagcctattctagggagacatgtcatctttcatgaaggttcagtgtcctagttcccttcccccaggcaaaacgacacgggagcaggtcagggttgctctgggtaaaagcctgtgagcctaagagctaatcctgtacatggctcctttacctacacactggggatttgacctctatctccactctcattaatatgggtggcctatttgctcttattaaaaggatagggggagatgttgggagccgcgcccacattcgccgttacaagatggcgctgacagctgtgttctaagtggtaaacaaataatctgcgcatgtgccaagggtatcttatgactacttgtgctctgccttccccgtgacgtcaactcggccgatgggctgcagccaatcagggagtgacacgtccgaggcgaaggagaatgctccttaagagggacggggtttcgttttctctctctcttgcttcttgctctcttgcttcttacacgcttgctcctgaagatgtaagaaataaagctttgccgcagaagattctggtctgtggtgttcttcctggccggtcgtgagaacgcgtctaataaca

SEQ ID NO: 382 - DNA, 7119 bp, Artificial Sequence
  Description of Artificial Sequence: Synthetic polynucleotide
tgtgggaagccgcccccacattcgccgtcacaagatggcgctgacatcctgtgttctaagttggtaaacaaataatctgcgcatgagccaagggtatttacgactacttgtactctgtttttcccgtgaacgtcagctcggccatgggctgcagccaatcagggagtgatgcgtccgaggcaattgttgttctctttaaagaggaaaggggtttcgttttctctctctcttgcttcttacactctggccccataagatgtaagcaataaagctttgccgtagaagattctgggtgttgtgttcttcctggccggtcgtgagaacgcgtcgaataacaattggtgccgaaaacccgagacgagaaaaaactccggactggcgcagggaagatccctcattccggaaccagaactgcggatcacgtttataaaggttcccgtaacacagactgttgagaaggattcaactgccgaattcagaactcatcagctggggaacgacggtgataaaggttcccgtaaagcagactgttaagaaggattcaactgtatgaattcagaacttttcagctggggaacgagagtaccagtgagtatgtttggccttgaattttttctggtgttaggagcccttttgttctttttcacatgttatcaagtgattaagatagggctgaaaattctagaggaaattcaggacaagctatcagaagtaaagcgggaagaaagagtaggaacaaagaggaagtatggtacacaaaataagtatacaggcctttccaagggtcttgaacccgaggaaaagttaaggttaggtaggaatacctggagagagattagaagaaaaagaggaaaaagggaaaagaagaaagatcgattagcggaggtctctaggagatactcgtcactagatgagctcaggaagccagctcttagtagctctgaagcaagtgaagaatcctcctctgaggaaacagactgggaggaagaagcagcccattaccagccagctaattggtcaagaaaaaagccaaaagcggctggcgaaagtcagcgtactgttcaacctcccggcagtcggtttcaaggtccgccctatgcggagcccccgccctgcgtagtgcgtcagcaatgcgcagagaggcaatgcgcagagagatgcgcagagaggcagtgcgcagagagatgcgcagagaggcagtgcgcagagaggcagtgcgcagagaggcagtgcgcagactcattcattccccgagaggaacaaaagaaaatacaacaggcatttccagtctttgaaggagccgagggtgggcgtgtccacgctccggtagaatacgtacagattaaggaaattgccgagtcggttcgtaaatacggaaccaatgctaattttaccttggcgcagttagacaggctcgctggcatggcactaacgcctgctgattggcagacggttgtaaaagccgctctccctagtatgggcaaatatatggaatggaaagcgctttggcacgaagctgcacaggcgcaggcccgagcaaacgcagctgctttgactccagagcagagagattggacttttgacttgttaacgggtcagggagcttattctgctgatcagacaaactaccattggggagcttatgcccagatttcttccacggctattagggcctggaaggcgctctctcgagcaggtgaaaccactggtcagttaacaaagataatccagggacctcaggaatctttctcagattttgtggccagaatgacagaggcagcagagcgtatttttggagagtcagagcaagctgcgcctctcatagaacagctaatctacgagcaagccacaaaggagtgccgagcggccatagccccaagaaagaacaaaggcttacaagactggctcagggtctgtcgagagcttgggggacctctcagcaatgcaggtttagcggctgccatccttcaatctcagaaccgctccatgggcagaaatgatcagaggacatgttttaattgcggaaagcctgggcattttaagaaagattgcagagctccagataaacagggagggactctcactctttgctctaagtgtggcaagggttatcatagagctgaccagtgtcgctctgtgagggatataaagggcagaattcttcccccacctgatagtcaatcaactgatgtgccaaaaaacgggtcatcgggccctcggtcccagggccctcaaagatatgggaaccggtttgtcaggacccaggaagcagtcagagagacgacccaggaagacccacaagggtggacctgcgtgccgcctccgacttcctattaatgcctcaaatgagtattcagccggtgccggtggagcctataccatccttgcccccgggaaccatgggccttattctcggccgaggttcactcaccttgcagggcttagtagtccaccctggagttatggattgtcaacattcccctgaaatacaggtcctgtgctcaagccctaaaggcgttttttctattagtaaaggagataggatagctcagctgctgctcctccctgataataccagggagaaatctgcaggacctgagataaagaaaatgggctcctcaggaaatgattctgcctatttggttgtatctttaaatgatagacctaagctccgccttaagattaatggaaaagagtttgaaggcatccttgataccggagcagataaaagtataatttctacacattggtggcccaaagcatggcccaccacagagtcatctcattcattacagggcctaggatatcaatcatgtcccactataagctccgttgccttgacgtgggaatcctctgaagggcagcaagggaaattcataccttatgtgctcccactcccggttaacctctggggaagggatattatgcagcatttgggccttattttgtccaatgaaaacgccccatcaggagggtattcagctaaagcaaaaaatatcatggcaaagatgggttataaagaaggaaaagggttaggacatcaagaacagggaaggatagagcctatcttacctaatggaaaccaagacagacagggtctgggtttttccttagcggccattggggcagcacgacccataccatggaaaacaggggacccagtgtgggttcctcaatggcacctatcctctgaaaaactagaagctgtgattcaactggtagaggaacaattaaaactaggccatattgaaccctctacctcaccttggaatactccaatttttgtaattaagaaaaagtcaggaaagtggagactgctccatgacctcagagccattaatgagcatatgaacttatttggcccagtacagaggggtctccctgtactttccgccttaccacgtggctggaatttaatcattatagatattaaagattgtttcttttctatacctttgtgtccaagggataggcccagatttgcctttaccatcccctctattaatcacatggaacctgataagaggtatcaatggaaggtcttaccacagggaatgtccaatagtcctactatgtgtcaactttatgtacaagaagctcttttgccagtgagggaacaattcccctctttaattttgctcctttacatggatgacatcctcctgtgccataaagaccttaccatgctacaaaaggcatatccttttctacttaaaactttaagtcagtggggtttacagatagccacagaaaaggtccaaatttctgatacaggacaattcttgggctctgtggtgtccccagataagattgtgccccaaaaggtagagataagaagagatcacctccataccttaaatgattttcaaaagctgttgggagatattaattggctcagaccttttttaaagattccttccgctgagttaaggcctttgtttagtattttagaaggagatcctcatatctcctcccctaggactcttactctagctgctaaccaggccttacaaaaggtggaaaaagccttacagaatgcacaattacaacgtattgaggattcgcagcctttcagtttgtgtgtctttaagacagcacaattaccaactgcagttttgtggcagaatgggccattgttgtggatccatccaaacgtatccccagctaaaataatagattggtatcctgatgcaattgcacagcttgcccttaaaggcctaaaagcagcaatcacccactttgggcaaagtccatatcttttaattgtaccttataccgctgcacaggttcaaaccttggcagccacatctaatgattgggcagttttagttacctccttttcaggaaaaatagataaccattatccaaaacatccaatcttacagtttgcccaaaatcaatctgttgtgtttccacaaataacagtaagaaacccacttaaaaatgggattgtggtatatactgatggatcaaaaactggcataggtgcctatgtggctaatggtaaagtggtatccaaacagtataatgaaaattcacctcaagtggtagaatgtttagtggtcttagaagttttaaaaacctttttagaaccccttaatattgtgtcagattcctgttatgtggtaaatgcagtaaatcttttagaagcggctggagtgattaagccttccagtagagttgccaatatttttcagcagatacaattagttttgttatctagaagatctcctgtttatattactcatgttagagcccactcaggcctacctggccccatggctctgggaaatgatttggcagataaggccactaaagtggtggctgctgccctatcatccccggtagaggctgcaagaaattttcataacaattttcatgtgacggctgaaacattacgcagtcgtttctccttgacaagaaaagaagcccgtgacattgttactcaatgtcaaagctgctgtgagttcttgccagttcctcatgtgggaattaacccacgcggtattcgacctctacaggtctggcaaatggatgttacacatgtttcttcctttggaaaacttcaatatctccatgtgtccattgacacatgttctggcatcatgtttgcttctccgttaactggagaaaaagcctcacatgtgattcaacattgtcttgaggcatggagtgcttgggggaaacccagactccttaagactgataatggaccagcttatacgtctcaaaaatttcaacagttctgccgtcagatggacgtaacccacctgactggacttccatacaaccctcaaggacagggtattgttgagcgtgcgcatcgcaccctcaaagcctatcttataaaacagaagaggggaacttttgaggagactgtaccccgagcaccaagagtgtcggtgtctttggcactctttacactcaattttttaaatattgatgctcatggccatactgcggctgaacgtcattgttcagagccagataggcccaatgagatggttaaatggaaaaatgttcttgataataaatggtatggcccggatcctatcttgataagatccaggggagctatctgtgttttcccacagaatgaagacaacccattttgggtaccagaaagactcacccgaaaaatccagactgaccaagggaatactaatgtccctcgtcttggtgatgtccagggcgtcaataataaagagagagcagcgttgggggataatgtcgacatttccactcccaatgacggtgatgtataatgctcaagtattctcctgcttttttaccactaactgggaactgggtttggccttaattcagacagccttggctctgtctggacaggtccagatgactgacaccattaacactttgtcagcctcagtgactacagtcatagatgaacaggcctcagctaatgtcaagatacagagaggtctcatgctggttaatcaactcatagatcttgtccagaaacaactagatgtattatgacaaataactcagcagggatgtgaacaaaagtttccgggattgtgtgttatttccattcagtatgttaaatttactagggcagctaatttgtcaaaaagtctttttcagtatatgttacagaattggatggctgaatttgaacagatccttcgggaattgagacttcaggtcaactccacgcgcttggacctgtcgctgaccaaaggattacccaattggatctcctcagcattttctttctttaaaaaattgggtgggattaatattatttggagatacactttgctgtggattagtgttgcttctttgattggtctgtaagcttaaggcccaaactaggagagacaaggtggttattgcccaggcgcttgcaggactagaacatggagcttcccctgatatatctatgcttaggcaataggtcgctggccactcagctcttatatctcacgaggctagactcattgcacgagatagagtgagtgtgcttcagcagcccgagagagttgcaaggctaagcactgcagtagaagggctctgcggcacatatgagcctattctagggagacatgtcatctttcatgaaggttcagtgtcctagttcccttcccccaggcaaaacgacacgggagcaggtcagggttgctctgggtaaaagcctgtgagcctaagagctaatcctgtacatggttcctttacctacacactggggatttgacctctatctccactctcgttaatatgggtggcctatttgctcttattaatagaaaagggggaactgtgggaagccgcccccacattcgccgtcacaagatggcgctgacatcctgtgttctaagttggtaaacaaataatctgcgcatgagccaagggtatttacgactacttgtactctgtttttcccgtgaacgtcagctcggccatgggctgcagccaatcagggagtgatgcgtccgaggcaattgttgttctctttaaagaggaaaggggtttcgttttctctctctcttgcttcttacactctggccccataagatgtaagcaataaagctttgccgtagaagattctgggtgttgtgttcttcctggccggtcgtgagaacgcgtcgaataaca

SEQ ID NO: 383 - DNA, 7126 bp, Artificial Sequence
  Description of Artificial Sequence: Synthetic polynucleotide
tgttgggagccgcgcccacattcgccgttacaagatggcgctgacagctgtgttctaagtggtaaacaaataatctgcgcatgtgccgagggtggttcttcactccatgtgctctgccttccccgtgacgtcaactcggccgatgggctgcagccaatcagggagtgacacgtcctaggcgaaggagaattctctttaatagggacggggtttcgttttctctctctcttgcttcttgctctcttgcttcttgcactctggctcctgaagatgtaagcaataaagctttgccgcagaagattctggtctgtggtgttcttcctggccggtcgtgagaacgcgtctaataacaattggtgccgaattccgggacgagaaaaaactcgggactggcgcaaggaagatccctcattccagaaccagaactgcgggtcgcggtaataaaggttcccgtaaagcagactgttaagaaggattcaactgtatgaattcagaacttttcagctggggaacgagagtaccagtgagtacagctttacgaggtaagtctgatcttgaactttctaaggaaattcaagacagtctatcagaagtaaagtggaatatgtttggccttgaattttttctggtgttaggagcccttttgttccttttcacatgttatcaagtgattaagatagggctgaaaattctagaggaaattcaggacaagctatcagaagtaaagcggggagagagagtaggagcaaagagaaaatatggtacacaaaataagtatacaggcctttccaagggtcttgaacccgaggaaaagttaaggttaggtaggaatacctggagagagattagaagaaaaagaggaaaaagggaaaagaagaaagatcaattagcggaggtctctaggaaaaggagcctgtgctcatcgctggatgggctcggggagccagctcttagtagctctgaagcagatgaagaattctcctctgaagaaacagactgggaggaagaagcagctcattatgagaaaaaagggtaccagccaggtaaagtgctagctaatcagttaaggaagccaaaagcggctggcgaaggccagtttgctgattggcctcagggcagtcggtttcaaggtccgccctatgcggagcccccgccctgcgtagtgcgtcagcaatgcgcagagagatgcgcagagaggcagtgcgcagagaggcagtgcgcagactcattcattcccagagaggaacaaaggaaaatacaacaggcatttccggtctttgaaggagccgagggtgggcgtgtccacgctccggtagaatacttacaaattaaagaaattgccgagtcggtccgtaaatacggaaccaatgctaattttaccttggtgcagttagacaggctcgccggcatggcactaactcctgctgactggcaaacggttgtaaaagccgctctccctagtatgggcaaatatatggaatggagagcgctttggcacgaagctgcacaagcgcaggcccgagcaaacgcagctgctttgactccagagcagagagattggacttttgacttgttaacgggtcagggagcttattctgctgatcagacaaactaccattggggagcttatgcccagatttcttccacggctattagggcctggaaggcgctctctcgagcaggtgaaaccactggtcagttaacaaagataatccagggacctcaggaatccttctcagattttgtggccagaatgacagaggcagcagagcgtatttttggagagtcagagcaagctgcgcctctgatagaacagctaatctatgagcaagccacaaaggagtgccgagcggccatagccccaagaaagaacaaaggcttacaagactggctcagggtctgtcgagagcttgggggacctctcaccaatgcaggcttagcggccgccatcctccaatctcagaaccgctccatgggcagaaatgatcagaggacatgttttaattgcggaaagcctgggcattttaagaaagattgcagagctccagataaacagggagggactctcactctttgctctaagtgtggcaagggttatcatagagctgaccagtgtcgctctgtgagggatataaagggcagagtccttcccccacctgatagtcaatcaactgatgtgccaaaaaacgggtcatcgggccctcggtcccagggccctcaaagatatgggaaccggtttgtcaggacccaggaagcagtcagagaggcgacccaggaagacccacaagggtggacctgcgtgccgcctccgacttcctattaatgcctcaaatgagtattcagccggtgccagtggagcctataccatccttgcccctgggaaccatgggccttattctcggccggggttcactcaccttgcagggcttagtagtccaccctggagttatggattgtcaacattcccctgaaatacaggtcctgtgctcaagccctaaaggcgttttttctattagtaaaggagataggatagctcagctgctgctcctccctgataataccagggagaaatctgcaggacctgagataaagaaaatgggctcctcaggaaatgattctgcctatttggttgtatctttaaatgatagacctaagctccgccttaagatcaacggaaaagagtttgaaggcatccttgataccggagcagataaaagtataatttctacacattggtggcccaaagcatggcccaccacagagtcatctcattcattacagggcctaggttatcaatcatgtcccactataagctccattgccttgacgtgggaatcctctgaagggcagcaagggaaattcataccttatgtgctcccactcccggttaacctctggggaagggatattatgcagcatttgggccttattttgtccaatgaaaacgccccatcgggagggtattcaactaaagcaaaaaatatcatggcaaagatgggttataaagaaggaaaagggttaggacatcaagaacagggaaggatagagcccatctcacctaatggaaaccaagacagacagggtctgggttttccttagcggccattggggcagcacgacccataccatggaaaacaggggacccagtgtgggttcctcaatggcacctatcctctgaaaaactagaagctgtgattcaactggtagaggaacaattaaaattaggccatattgaaccctctacctcaccttggaatactccaatttttgtaattaagaaaaagtcaggaaagtggagactgctccatgacctcagagccattaatgagcaaatgaacttatttggcccagtacagaggggtctccctgtactttccgccttaccacgtggctggaatttaattattatagatattaaagattgtttcttttctatacctttgtgtccaagggataggcccagatttgcctttaccatcccctctattaatcacatggaacctgataagaggtatcaatggaaggtcttaccacagggaatgtccaatagtcctacaatgtgccaactttatgtgcaagaagctcttttgccagtgagggaacaattcccctctttaattttgctcctttacatggatgacatcctcctgtgccataaagaccttaccatgctacaaaaggcatatccttttctacttaaaactttaagtcagtggggtttacagatagccacagaaaaggtccaaatttctgatacaggacaattcttgggctctgtggtgtccccagataagattgtgccccaaaaggtagagataagaagagatcacctccataccttaaatgattttcaaaagctgttgggagatattaattggctcagaccttttttaaagattccttccgctgagttaaggcctttgtttagtattttagaaggagatcctcatatctcctcccctaggactcttactctagctgctaaccaggccttacaaaaggtggaaaaggccttacagaatgcacaattacaacgtattgaggattcgcagcctttcagtttgtgtgtctttaagacagcacaattgccaactgcagttttgtggcagaatgggccattgttgtggatccatccaaacgtatccccagctaaaataatagattggtatcctgatgcaattgcacagcttgcccttaaaggcctaaaagcagcaatcacccactttgggcaaagtccatatcctttaattgtaccttataccgctgcacaggttcaaaccttggcagccacatctaatgattgggcagttttagttacctccttttcaggaaaaatagataaccattatccaaagcatccaatcttacagtttgcccaaaatcaatctgttgtgtttccacaaataacagtaagaaacccacttaaaaatgggattgtggtatatactgatggatcaaaaactggcataggtgcctatgtggctaatggtaaagtggtatccaaacaatataatgaaaattcacctcaagtggtagaatgtttagtggtcttagaagttttaaaaacctttttagaaccccttaatattgtgtcagattcctgttatgtggttaatgcagtaaatcttttagaagtggctggagtgattaagccttccagtagagttgccaatatttttcagcagatacaattagttttgttatctagaagatctcctgtttatattactcatgttagagcccattcaggcctacctggccccatggctctgggaaatgatttggcagataaggccactaaagtggtggctgctgccctatcatccccggtagaggctgcaaaaaattttcataacaattttcatgtgacggctgaaacattacgcagtcgtttctccttgacaagaaaagaagcccgtgacattgttactcaatgtcaaagctgctgtgagttcttgccagttcctcatgtgggaattaacccacgcggtattcgacctctacaggtctggcaaatggatgttacacatgtttcttcctttggaaaacttcaatatctccatgtgtccattgacacatgttctggcatcatgtttgcttctccgttaaccggagaaaaagcctcacatgtgattcaacattgccttgaggcatggagtgcttgggggaaacccagactccttaagactgataatggaccagcttatacgtctcaaaaattccaacagttctgccgtcagatggacgtgacccacctgactggacttccatacaaccctcaaggacagggtattgttgagcgtgcgcatcgcaccctcaaaacctatcttataaaacagaagaggggaacttttgaggagactgtaccccgagcaccaagagtgtctgtgtctttggcactctttacactcaattttttaaatattgatgctcatggccatactgcggctgaacgtcattgtacagagccagataggcccaatgagatggttaaatggaaaaatgtccttgataataaatggtatggcccggatcctattttgataagatccaggggagctatctgtgttttcccacagaatgaagacaacccattttgggtaccagaaagactcacccgaaaaatccagactgaccaagggaatactaatgtccctcgtcttggtgatgtccagggcgttaataataaagagagagcagcgttgggggataatgtcgacatttccactcccaatgacggtgatgtataatgctcaagtattctcctgcttttttaccactaactgggaactgggtttggccttgattcagacagccttggctctgtctggacaggtccagacgactgacaccattaacactttgtcagcctcagtgactacagtcatagataaacaggcctcagctaatgtcaagatacagagaggtctcatgctggttaatcaactcatagatcttgtccagatacaactagatgtattatgacaaataactcagctgggatgtgaacaaaagtttccggaattgtgtgttatttccattcagtatgttaaatttactagggcagctaatttgtcaaaaagtctttttcagtatatgttacagaattggatggctgaatttgaacagatccttcgggaattgagacttcaggtcaactccacgcgcttggacctgtcgctgaccaaaggattacccaattggatctcctcagcattttccttctttaaaaaatgggtgggattaatattatttggagatacactttgctgtggattagtgttgcttctttgattggtctgtaagcttaaggcccaaactaggagagacaaggtggttattgcccaggcgcttgcaggactagaacatggagctccccctgatatatggttatctatgcttaggcaataggtcgctggccactcagctcttatatcccacgaggctagtctcattgcacgggatagagtgagtgtgcttcagcagcccgagagagttgcacggctaagcactgcaatggaaaggctctgcggcatatatgagcctattctagggagacatgtcatctttcatgaaggttcagtgtcctagttcccttcccccaggcaaaacgacacgggagcaggtcagggttgctctgggtaaaagcctgtgagcctaagagctaatcctgtacatggctcctttacctacacactggggatttgacctctatctccactctcattaatatgggtggcctatttgctcttattaaaagaaaagggggagatgttgggagccgcgcccacattcgccgttacaagatggcgctgacagctgtgttctaagtggtaaacaaataatctgcgcatgtgccgagggtggttcttcactccatgtgctctgccttccccgtgacgtcaactcggccgatgggctgcagccaatcagggagtgacacgtcctaggcgaaggagaattctctttaatagggacggggtttcgttttctctctctcttgcttctcgctcgctcttgcttcttgcactctggctcctgaagatgtaagcaataaagttttgccgcagaagattctggtctgtggtgttcttcctggccggtcgtgagaacgcgtctaataaca

SEQ ID NO: 384 - DNA, 7155 bp, Artificial Sequence
  Description of Artificial Sequence: Synthetic polynucleotide
tgtgggaagccgcccccacattcgccgtcacaagatggcgctgacatcctgtgttctaagttggtaaacaaataatctgcgcatgagccaagggtatttacgactacttgtactctgtttttcccgtgaacgtcagctcggccatgggctgcagccaatcagggagtgatgcgtcctaggcaattgttgttctctttaaagagggaagggggtttcgttttctctctctcttgcttcgctctctcttgcttcttacactctggccccataagatgtaagcaataaagctttgccgtagaagattctggttgttgtgttcttcctggccggtcgtgagaacgcgtcgaataacaattggtgccgaaacccgggacgagaaaaaactccggactggcgcaggagggatacttcatttcagaaccagaactgcggatcacgtttataaaggttcccgtaacacagactgttgagaaggattcaactgccgaattcagaactcatcagctggggaacgacggtgataaaggttcccgtaaagcagactgttaagaaggattcaactgtatgaattcagaacttttcagctggggaacgagagtaccagtgagtatgtttggccttgaattttttctggtgttaggagcccttttgttctttttcacatgttatcaagtgattaagatagggctgaaaattctagaggaaattcaggacaagctatcagaagtaaagcgggaagaaagagtaggaacaaagaggaagtatggtacacaaaataagtatacaggcctttccaagggtcttgaacccgaggaaaagttaaggttaggtaggaatacctggagagagattagaagaaaaagaggaaaaagggagaagaaaaaagatcgattagcggaggtctctaggagatactcgtcactagatgagctcaggaagccagctcttagtagctctgaagcaagtgaagaatcctcctctgaggaaacagactgggaggaagaagcagcccattaccagccagctaattggtcaagaaaaaagccaaaagcggctggcgaaagtcagcgtactgttcaacctcccggcagtcggtttcaaggtccgccctatgcggagcccccgccctgcgtagtgcgtcagcaatgcgcagagaggcagtgcgcagagagatgcgcagagaggcagtgcgcagagagatgcgcagagaggcagtgcgcagagaggcagtgcgcagagaggcagtgcgcagactcattcattccccgagaggaacaaaagaaaatacaacaggcatttccagtctttgaaggagccgagggtgggcgtgtccacgctccggtagaatacgtacagattaaggaaattgccgagtcggttcgtaaatacggaaccaatgctaattttaccttggcgcagttagacaggctcgctggcatggcactaactcctgccgactggcaaacggttgtaaaagccgctctccctagtatgggcaaatatatggaatggaaagcgctttggcacgaagctgcacaggcgcaggcccgagcaaacgcagctgctttgactccagagcagagagattggacttttgacttgttaacgggtcagggagcttattctgctgatcagacaaactaccattggggagcttatgcccagatttcttccacggctattagggcctggaaggcgctctctcgagcaggtgaaaccactggtcagttaacaaagataatccagggacctcaggaatctttctcagattttgtggccagaatgacagaggcagcagagcgtatttttggagagtcagagcaagctgcgcctctcatagaacagctaatctacgagcaagccacaaaggagtgccgagcggccatagccccaagaaagaacaaaggcttacaagactggctcagggtctgtcgagagcttgggggacctctcagcaatgcaggtttagcggctgccatccttcaatctcagaaccgctccatgagcagaaataatcagaggacatgttttaattgcggaaagcctgggcattttaagaaagattgcagagctccagataaacagggagggactctcactctttgctctaagtgtggcaagggttatcatagagctgaccagtgtcgctctgtgagggatataaagggcagaattcttcccccacctgatagtcaatcaactgatgtgccaaaaaacgggtcatcgggccctcggtcccagggccctcaaagatatgggaaccggtttgtcaggacccaggaagcagtcagagagacgacccaggaagacccacaagggtggacctgcgtgccgcctccgacttcctattaatgcctcaaatgagtattcagccggtgccggtggagcctataccatccttgcccccgggaaccatgggccttattctcggccgaggttcactcaccttgcagggcttagtagtccaccctggagttatggattgtcaacattcccctgaaatacaggtcctgtgctcaagccctaaaggcgttttttctattagtaaaggagataggatagctcagctgctgctcctccctgataataccagggagaaatctgcaggacctgagataaagaaaatgggctcctcaggaaatgattctgcctatttggttgtatctttaaatgatagacctaagctccgccttaagattaatggaaaagagtttgaaggcatccttgataccggagcagataaaagtataatttctacacattggtggcccaaagcatggcccaccacagagtcatctcattcattacagggcctaggatatcaatcatgtcccactataagctccgttgccttgacgtgggaatcctctgaagggcagcaagggaaattcataccttatgtgctcccactcccggttaacctctggggaagggatattatgcagcatttgggccttattttgtccaatgaaaacgccccatcaggagggtattcagctaaagcaaaaaatatcatggcgaagatgggttataaagaaggaaaagggttaggacatcaagaacagggaaggatagagcccatctcacctaatggaaaccaagacagacagggtctgggttttccttagcggccattggggcagcacgacccataccatggaaaacaggggacccagtgtgggttcctcaatggcacctatcctctgaaaaactagaagctgtgattcaactggtagaggaacaattaaaactaggccatattgaaccctctacctcaccttggaatactccaatttttgtaattaagaaaaagtcaggaaagtggagactgctccatgacctcagagccattaatgagcaaatgaacttatttggcccagtacagaggggtctccctgtactttccgccttaccacgtggctggaatttaattattatagatattaaagattgtttcttttctatacctttgtgtccaagggataggcccagatttgcctttaccatcccctctattaatcacatggaacctgataagaggtatcaatggaaggtcttaccacagggaatgtccaatagtcctactatgtgtcaactttatgtacaagaagctcttttgccagtgagggaacaattcccctctttaattttgctcctttacatggatgacatcctcctgtgccataaagaccttaccatgctacaaaaggcatatccttttctacttaaaactttaagtcagtggggtctacagatagccacagaaaaggtccaaatttctgatacaggacaattcttgggctctgtggtgtccccagataagattgtgccccaaaaggtagagataagaagagatcacctccataccttaaatgattttcaaaagctgttgggagatattaattggctcagaccttttttaaagattccttccgctgagttaaggcctttgtttagtattttagaaggagatcctcatatctcctcccctaggactcttactctagctgctaaccaggccttacaaaaagtggaaaaggccttacagaatgcacaattacaacgtattgaggattcgcagcctttcagtttgtgtgtctttaagacagcacaattgccaactgcagttttgtggcagaatgggccattgttgtggatccatccaaacgtatccccagctaaaataatagattggtatcctgatgcaattgcacagcttgcccttaaaggcctaaaagcagcaatcactcactttgggcaaagtccatatcttttaattgtaccttataccgctgcacaggttcaaaccttggcagccgcatctaatgattgggcagttttagttacctccttttcaggaaaaatagataaccattatccaaaacatccaatcttacagtttgcccaaaatcaatctgttgtgtttccacaaataacagtaagaaacccacttaaaaatgggattgtggtatatactgatggatcaaaaactggcataggtgcctatgtggctaatggtaaagtggtatccaaacaatataatgaaaattcacctcaagtggtagaatgtttagtggtcttagaagttttaaaaacctttttagaaccccttaatattgtgtcagattcctgttatgtggtaaatgcagtaaatcttttagaagtggctggagtgattaagccttccagtagagttgccaatatttttcagcagatacaattagttttgttatctagaagatctcctgtttatattactcatgttagagcccattcaggcctacctggccccatggctctgggaaatgatttggcagataaggccactaaagtggtggctgctgccctatcatccccggtagaggctgcaagaaattttcataataattttcatgtgacggctgaaacattacgcagtcgtttctccttgacaagaaaagaagcccgtgacattgttactcaatgtcaaagctgctgtgagttcttgccagttcctcatgtgggaattaacccacgcggtattcgacctctacaggtctggcaaatggatgttacacatgtttcttcctttggaaaacttcaatatctccatgtgtccattgacacatgttctggcatcatgtttgcctctccgttaaccggagaaaaagcctcacatgtgattcaacattgtcttgaggcatggagtgcttgggggaaacccagactccttaagactgataatggaccagcttatacgtcccaaaaatttcagcagttctgccgtcagatggacgtaacccacctgactggacttccatacaaccctcaaggacagggtattgttgagcgtgcgcatcgcaccctcaaagcctatcttataaaacagaagaggggaacttttgaggagactgtaccccgagcaccaagagtgtcggtgtctttggcactctttacactcaattttttaaatattgatgctcatggccatactgcggctgaacgtcattgttcagagccagataggcccaatgagatggttaaatggaaaaatgttcttgataataaatggtatggcccggatcctatcttgataagatccaggggagctatctgtgttttcccacagaatgaagacaacccattttgggtaccagaaagactcacccgaaaaatccagactgaccaagggaatactaatgtccctcgtcttggtgatgtccagggcgtcaataataaagagagagcagcgttgggggataatgtcgacatttccactcccaatgacggtgatgtataatgctcaagtattctcttgcttttttaccactaactgggaactgggtttggccttaattcagacagccttggttctgtctggacaggtccagatgactgacaccattaacactttgtcagcctcagtgactacagtcatagatgaacaggcctcagctaatgtcaagatacagagaggtctcatgctggttaatcaactcatagatcttgtccagaaacaactggatgtattatgacaaataactcagcagggatgtgaacaaaagtttccgggattgtgtgttatttccattcagtatgttaaatttactaggacagctaatttgtcaaaaagtctttttcagtatatgttacagaattggatggctgaatttgaacagatccttcgagaattgagacttcaggtcaactccacgcgcttggacctgtctctgaccaaaggattacccaattggatctcctcagcattttctttctttaaaaaattgggtgggattaatattatttggagatacactttgctgtggattagtgttgcttctttgattggtctgtaagcttaaggcccaaactaggagagacaaggtggttattgcccaggcgcttgcaggactagaacatggagcttcccctgatatatggttatctatgcttaggcaataggtcgctggccactcagctcttatatctcacgaggctagactcattgcacgagatagagtgagtgtgcttcagcagcccgagagagttgcaaggctaagcactgcagtagaagggctctgcggcacatatgagcctattctagggagacatgtcatctttcaagaaggttcagtgtcctagttcccttcccccaggcaaaacgacacgggagcaggtcagggttgctctgggtaaaagcctgtgagcctaagagctaatcctgtacatggctcctttacctacacactggggatttgacctctatctccactctcattaatatgggtggcctatttgctcttattaatagaaaagggggaactgtgggaagccgcccccacattcgccgtcacaagatggcgctgacatcctgtgttctaagttggtaaacaaataatctgcgcatgagccaagggtatttacgactacttgtactctgtttttcccgtgaacgtcagctcggccatgggctgcagccaatcagggagtgatgcgtcctaggcaattgttgttctctttaaagagggaagggggtttcgttttctctctctcttgcttcgctctctcttgcttcttacactctggccccataagatgtaagcaataaagctttgccgtagaagattctggttgttgtgttcttcctggccggtcgtgagaacgcgtcgaataaca

SEQ ID NO: 385 - DNA, 7084 bp, Artificial Sequence
  Description of Artificial Sequence: Synthetic polynucleotide
tgttgggagccgcgcccacattcgccgttacaagatggcgctgacagctgtgttctaagtggtaaacaaataatctgcgcatgtgccgagggtggttcttcactctatgtgctctgccttccccgtgacgtcaactcggccgatgggctgcagccaatcagggagtgacacgtcctaggcgaaggagaattctctttaatagggacggggtttcgttttctctctctcttgcttctcgctcgctcttgcttcttgcactctggctcctgaagatgtaagcaataaagttttgccgcagaagattctggtctgtggtgttcttcctggccgggcgtgagaacgcgtctaataacaattggtgccgaattccgggacgagaaaaaaactcgggactggcgcaaggaagatccctcattccagaaccagaactgcgggtcgcggtaataaaggttcccgtaaagcagactgttaagaaggattcaactgtatgaattcagaacttttcagctggggaacgagagtaccagtgagtacagctttacgaggtaagtctgatcttgaactttctaaggaaattcaagacagtctatcagaagtaaagtggaatatgtttggccttgaattttttctggtgttaggagcccttttgttccttttcacatgttatcaagtgattaagatagggctgaaaattctagaggaaattcaggacaagctatcagaagtaaagcggggagagagagtaggagcaaagagaaaatatggtacacaaaataagtatacaggcctttccaagggtcttgaacccgaggaaaagttaaggttaggtaggaatacctggagagagattagaagaaaaagaggaaaaagggaaaagaagaaagatcaattagcggaggtctctaggagatactcgtcactagatgagctcaggaagccagctcttagtagttctgaagcagatgaagaattctcctctgaggaaacagactgggaggaagaagcagcccattaccagccagctaattggtcaagaaaaaagccaaaagcggctggcgaaggccagtttgctgattggcctcagggcagtcggcttcaaggtccgccctatgcggagtccccgccctgcgtagtgcgtcagcaatgcgcagagaggcagtgcgcagagaggcagtgcgcagactcattcattcccagagaggaacaaaggaaaatacaacaggcatttccggtctttgaaggagccgagggtgggcgtgtccacgctccggtagaatacttacaaattaaagaaattgccgagtcggtccgtaaatatggaaccaatgctaattttaccttggtgcagttagacaggctcgccggcatggcactaactcctgctgactggcaaacggttgtaaaagccgctctccctagtatgggcaaatatatggaatggagagcgctttggcacgaagctgcacaagcgcaggcccgagcaaacgcagctgctttgactccagagcagagagattggacttttgacttgttaacgggtcagggagcttattctgctgatcagacaaactaccattggggagcttatgcccagatttcttccacggctattagggcctggaaggcgctctctcgagcaggtgaaaccactggtcagttaacaaagataatccagggacctcaggaatccttctcagattttgtggccagaatgacagaggcagcagagcgtatttttggagagtcagagcaagctgcgcctctgatagaacagctaatctatgagcaagccacaaaggagtgccgagcggccatagccccaagaaagaacaaaggcttacaagactggctcagggtctgtcgagagcttgggggacctctcagcaatgcaggtttagcggctgccatccttcaatcccaaaaccgctccatgggcagaaataatcagaggacatgttttaactgcggaaagcctgggcattttaagaaagattgcagagctccagataaacagggagggactctcactctttgctctaagtgtggcaagggttatcatagagctgaccagtgtcgctctgtgagggatataaagggcagagtccttcccccacctgatagtcaatcagctgatgtgccaaaaaacgggtcatcgggccctcggtcccagggccctcaaagatatgggaaccggtttgtcaggacccaggaagcagtcagagaggcgacccaggaagacccacaagggtggacctgcgtgccgcctccgacttcctactaatgcctcaaatgagtattcagccggtgccggtggagcctataccatccttgcccccgggaaccatgggccttattctcggccggggttcactcaccttgcagggcttagtagtccaccctggagttatggattgtcaacattcccctgaaatacaggtcctgtgctcaagccctaaaggcgttttttctattagtaaaggagataggatagctcagctgctgctcctccctgataataccagggagaaatttgcaggacctgagataaagaaaatgggctcctcaggaaatgattctgcctatttggttgtatctttaaatgatagacctaagctccgccttaagattaacggaaaagagtttgaaggcatccttgataccggagcagataaaagtataatttctacacattggtggcccaaagcatggcccaccacagagtcatctcattcattacagggcctaggatatcaatcatgtcccactataagctccattgccttgacgtgggaatcctctgaaggacagcaagggaaattcataccttatgtgctcccactcccggttaacctctggggaagggatattatgcagcatttgggccttattttgtccaatgaaaacgccccatcaggagggtattcagctaaagcaaaaaatatcatggcaaagatgggttataaagaaggaaaagggttaggacatcaagaacagggaaggatagagcccatctcacctaatggaaaccaagacagacagggtctgggttttccttagcggccattggggcagcacgacccataccatggaaaacaggggacccagtgtgggttcctcaatggcacctatcctctgaaaaactagaagctgtgattcaactggtagaggaacaattaaaactaggccatattgaaccctctacctcaccttggaatactccaatttttgtaattaagaaaaagtcaggaaagtggagactgctccatgacctcagagccattaatgagcaaatgaacttatttggcccagtacagaggggtctccctgtactttccgccttaccacgtggctggaatttaattattatagatattaaagattgtttcttttctatacctttgtgtccaagggataggcccagatttgcctttaccatcccctctattaatcacatggaacctgataagaggtatcaatggaaggtcttaccacagggaatgtccaatagtcctacaatgtgccaactttatgtgcaagaagctcttttgccagtgagggaacaattcccctctttaattttgctcctttacatggatgacatcctcctgtgccataaagaccttaccatgctacaaaaggcatatccttttctacttaaaactttaagtcagtggggtttacagatagccacagaaaaggtccaaatttctgatacaggacaattcttgggctctgtggtgtccccagataagattgtgccccaaaaggtagagataagaagagatcacctccataccttaaatgattttcaaaagctgttgggagatattaattggctcagaccttttttaaagattccttccgctgagttaaggcctttgtttagtattttagaaggagatcctcatatctcctcccctaggactcttactctagctgctaaccaggccttacaaaaggtggaaaaagccttacagaatgcacaattacaacgtattgaggattcgcagcctttcagtttgtgtgtctttaagacagcacaattgccaactgcagttttgtggcagaatgggccattgttgtggatccatccaaacgtatccccagctaaaataatagattggtatcctgatgcaattgcacagcttgcccttaaaggtctaaaagcagcaatcacccactttgggcaaagtccatatcttttaattgtaccttataccgctgcacaggttcaaaccttggcagccacatctaatgattgggcagttttagttacctccttttcaggaaaaatagataaccattatccaaaacatccaatcttacagtttgcccaaaatcaatctgttgtgtttccacaaataacagtaagaaacccacttaaaaatgggattgtggtatatactgatggatcaaaaactggcataggtgcctatgtggctaatggtaaagtggtatccaaacaatataatgaaaattcacctcaagtggtagaatgtttagtggtcttagaagttttaaaaacctttttagaaccccttaatattgtgtcagattcctgttatgtggttaatgcagtaaatcttttagaagtggctggagtgattaagccttccagtagagttgccaatatttttcagcagatacaattagttttgttatctagaagatttcctgtttatattactcatgttagagcccattcaggcctacctggccccatggctctgggaaataatttggcagataaggccactaaagtggtggctgctgccctatcatccccggtagaggctgcaagaaattttcataacaattttcatgtgacggctgaaacattacgcagtcgtttctccttgacaagaaaagaagcccgtgacattgttactcaatgtcaaagctgctgtgagttcttgccagttcctcatgtgggaattaacccacgcggtattcgacctctacaggtctggcaaatggatgttacacatgtttcttcctttggaaaacttcaatatctccatgtgtccattgacacatgttctggcatcatgtttgcttctccattaaccggagaaaaagcctcacatgtgattcaacattgccttgaggcatggagtgcttgggggaaacccagactccttaagactgataatggaccagcttatacgtctcaaaaattccaacagttctgccgtcagatggacgtgacccacctgactggacttccatacaaccctcaaggacagggtattgttgagcgtgcgcatcgcaccctcaaaacctatcttataaaacagaagaggggaacttttgaggagactgtaccccgagcaccaagagtgtcggtgtctatggcactctttacactcaattttttaaatattgatgctcatggccatactgcggctgaacgtcattgtacagagccagataggcccaatgagatggttaaatggaaaaatgtccttgataataaatggtatggcccggatcctattttgataagatccaggggagctatctgtgttttcccacagaatgaaaacaacccattttggataccagaaagactcacccgaaaaatccagactgaccaaggaaatactaatgtccctcgtcttggtgatgtccagggcgtcaataataaaaagagagcagcgttgggggataatgtcgacatttccactcccaatgacggtgatgtataatgctcaagtattctcctgcttttttaccactaactaggaactgggtttggccttaattcagacagccttggctctgtctggacaggtccagacaactgacaccattaacactttgtcagcctcagtgactacagtcatagatgaacaggcctcagctaatgtcaagatacagagaggtctcatgctggttaatcaactcatagatcttgtccagatacaactagatgtattatgacaattaactcagctgggatgtgaacaaaagtttccgggattgtgtgttatttccattcagtatgttaaatttactaggacagctaatttgtcaaaaagtctttttcagtatatgttacagaattggatggctgaatttgaacagatccttcgggaattgagacttcaggtcaactccacgcgcttggacctgtcgctgaccaaaggattacccaattggatctcctcagcattttccttctttaaaaaatgggtgggattaatattatttggagatacactttgctgtggattagtgttgcttctttgattggtctgtaagcttaaggcctaaactaggagagacaaggtggttattgcccaggcgcttgcaggactagaacatggagctccccctgatatatggttatctatgcttaggcaataggtcgctggccactcagctcttacatctcacgaggctagactcattgcacgggatggagtgagtgtgcttcagcagcccgagagagttgcacggctaagcactgcaatggaaaggctctgcggcatatatgagcctattctagggagacatgtcatctttcatgaaggttcagtgtcctagttcccttcccccaggcaaaacgacacgggagcaggtcagggttgctctgggtaaaagcctgtgagcctaagagctaatcctgtacatggctcctttacctacacactggggatttgacctctatctccactctcattaatatgggtggcctatttgctcttattaaaagaaaagggggagatgttgggagccgcgcccacattcgccgttacaagatggcgctgacagctgtgttctaagtggtaaacaaataatctgcgcatgtgccgagggtggttcttcactctatgtgctctgccttccccgtgacgtcaactcggccgatgggctgcagccaatcagggagtgacacgtcctaggcgaaggagaattctctttaatagggacggggttttgttttctctctctcttgcttctcgctcgctcttgcttcttgcactctggctcctgaagatgtaagcaataaagttttgccgcagaagattctggtctgtggtgttcttcctggccgggcgtgagaacgcgtctaataaca
